(19) United States
(12) Patent Application Publication
(10) Pub. No.: US 2013/0280269 A1
(43) Pub. Date: Oct. 24, 2013

(54) Manipulation of HSP70 and IRE1Alpha Protein Interactions

(71) Applicants: Afshin Samali, Co. Galway (IE); Sanjeev Gupta, Co. Galway (IE); Aysawaria Deepti, Kerala Kochi (IN)

(72) Inventors: Afshin Samali, Co. Galway (IE); Sanjeev Gupta, Co. Galway (IE); Aysawaria Deepti, Kerala Kochi (IN)

(73) Assignee: National University of Ireland, Galway (IE)

(21) Appl. No.: 13/702,649

(22) PCT Filed: Jun. 8, 2011
(86) PCT No.: PCT/IB11/52499

§ 371 Date: May 2, 2013

Related U.S. Application Data
(60) Provisional application No. 61/352,498, filed on Jun. 8, 2010.

(51) Int. Cl. C12N 9/12

(52) U.S. Cl. CPC C12N 9/12
USPC 424/146.1; 435/455; 435/375; 435/69.1; 435/7.21; 424/152.1; 514/44 R

(57) ABSTRACT

The present invention relates to methods that manipulate the level of interaction between the proteins Hsp70 and IRE1α. In particular, the invention relates to methods of manipulating this interaction in order to increase protein yield, and to methods of manipulating this interaction in order to treat diseases associated with abnormal apoptotic activity, including cancer and autoimmune diseases.

### FIELD OF THE INVENTION

[0001] The present invention relates to methods that manipulate the level of interaction between the proteins Hsp70 and IRE1α. In particular, the invention relates to methods of manipulating this interaction in order to increase protein yield, and to methods of manipulating this interaction in order to treat diseases associated with abnormal apoptotic activity, including cancer and autoimmune diseases.

### BACKGROUND

[0002] The human HSP70 family consists of at least 12 members [1,2]. Of these, the two best studied members are the constitutive or cognate Hsp70 (Hsc70) and its inducible form (Hsp72). Hsc70 is constitutively and ubiquitously expressed in tissues and has basic and essential functions as a molecular chaperone in the folding of proteins [1,2] under normal cellular conditions. Hsp72 is expressed at low levels under normal conditions and its expression is induced upon exposure to environmental stresses such as heat shock, exposure to heavy metals, hypoxia, anoxia and ischemia [1,2].

[0003] Physiological or pathological processes that disrupt protein folding in the endoplasmic reticulum lead to ER stress and trigger a set of signalling pathways termed the Unfolded Protein Response (UPR) [16]. This complex cellular response transmits information about the protein-folding status of the ER lumen to the cytosol and nucleus of the cell, resulting in an increase in protein-folding capacity [17,18]. If these mechanisms of cellular adaptation are unable to alleviate the cellular stress [19] the cell will undergo apoptosis, or programmed cell death.

[0004] Hsp72 has strong cytoprotective effects and functions as a molecular chaperone in protein folding, transport, and degradation during periods of cellular stress. The cytoprotective effect of Hsp72 is related to its ability to inhibit apoptosis [3,4], which appears to occur by several distinct mechanisms [3,5,6]. For example, Hsp72 prevents the formation of an active apoptosome [7,8], inhibits the release of cytochrome c from the mitochondria [9,10,11] and suppresses JNK, a stress-activated protein kinase [12]. In addition, overexpression of Hsp70 in CHO cells has previously been used as a mechanism for extending the viability of cells in culture [67]. However, to date there has been no indication of the point at which Hsp72 interacts with the apoptotic pathway in order to facilitate these distinct apoptotic mechanisms.

[0005] Here, the inventors have surprisingly identified a previously unknown interaction between Hsp72 and inositol requiring enzyme 1 (IRE1α), a transmembrane sensor of ER stress. The inventors have shown that this interaction is responsible for regulating the UPR, and have uncovered novel methods of manipulating this interaction to increase protein production in a cellular system and to treat disorders associated with aberrant apoptosis.

### DETAILED DESCRIPTION OF PREFERRED EMBODIMENTS

[0006] The inventors have surprisingly discovered that Hsp72 interacts with IRE1α during the UPR. This interaction implicates Hsp72 in the regulation of IRE1α signalling by modulating the UPRosome [24,25], a complex protein platform that operates at the ER membrane to control IRE1 activity. The interaction between Hsp70 and IRE1α is implicated in controlling each of the UPR pathways which involve IRE1α. The identification of this interaction has multiple applications, both in the field of protein production and in the field of therapy.

[0007] In one aspect the invention provides a method of generating a cell for protein production, the method comprising a step of manipulating the cell to increase the level of interaction between Hsp70 and IRE1α, such that the level of unconventionally-spliced XBP1 (XBP1s) mRNA rises and/or the level of JNK or the level of activation of JNK is reduced.

[0008] In another aspect the invention provides a method of treating disease, the method comprising a step of modulating the level of interaction between Hsp70 and IRE1α. As a result, the level of unconventionally-spliced XBP1 (XBP1s) mRNA and/or the level of JNK or the level of activation of JNK may be altered.

### The Unfolded Protein Response (UPR)

[0009] The Unfolded Protein Response (UPR) is induced in response to any stimuli that causes disruption to ER homeostasis. Such stimuli include agents that cause changes in ER calcium concentration (thapsigargin, calcium ionophore), the disruption of glycosylation (using tunicamycin), the inhibition of ER to Golgi transport (e.g. using brefeldin A), conditions that increase ER protein load (e.g. viral infection), pathological conditions where protein load in the ER increases (e.g. viral infection, accumulation of mutated proteins) and metabolic stress (e.g. exposure to anoxia and ischemia). The basic pathway of the UPR is shown in FIG. 11. The three major transmembrane sensors of ER stress in metazoans are inositol requiring enzyme 1 (IRE1α; also referred to as endoplasmic reticulum-to-nucleus signalling 1 (ERN1)), double-stranded RNA-activated protein kinase (PKR)-like ER kinase (PERK, also referred to as pancreatic eukaryotic initiation factor 2α kinase (PEK) and EIF2AK3), and activating transcription factor 6 (ATF6) [17,18].

[0010] IRE1α, the prototype ER stress sensor, is evolutionarily conserved from yeast to humans. IRE1α is a Ser/Thr protein kinase and endoribonuclease that has several functions within the UPR which are believed to operate at different stages of an ER stress response. These functions are depicted in FIG. 14.

[0011] IRE1α is activated following oligomerization of the ER luminal domain in response to ER stress. This leads to trans-autophosphorylation, which activates the endoribonculease activity of the protein.

[0012] Once activated, IRE1α may initiate the unconventional splicing of the X-box binding protein (XBP1) mRNA [20]. This unconventional splicing includes the excision of a 26 nucleotide long intron of unspliced XBP1 mRNA (XBP1u), which causes a frame shift to occur and a longer version of the XBP1 mRNA (SEQ ID NO: 3) to be produced. Unconventionally spliced XBP1 (XBP1s) mRNA (SEQ ID NO: 3) encodes a highly active transcription factor (SEQ ID NO: 4) which can induce a broad spectrum of UPR-related genes involved in protein folding, protein entry to the ER, ER-associated degradation (ERAD), and protein quality control [21].

[0013] XBP1s regulates several UPR target genes including ER chaperones (Grp78, ERdj4, ERdj5, HEDJ, Grp58, and PDIP5), ERAD components (EDEM, HERP, and p58^{1PK}), transcription factors (CHOP and XBP1) and other proteins related to the secretory pathway [23]. This upregulation of genes involved in the UPR leads to a reduction in apoptosis, which is thought to occur at an early stage of the ER stress response.

[0014] IRE1α is also involved in the degradation of many mRNAs encoding secretory proteins [82,83]. This pathway has been named Regulated IRE1α-dependent mRNA decay (RIDD; [82]), and is independent of XBP1 splicing. It is thought that this IRE1α pathway predominates at a later stage of the UPR, and functions to reduce the protein folding burden on the ER whilst the levels of stress are brought under control.

[0015] A third function of activated IRE1α is in activating c-Jun N-terminal kinases ((JNK), also know as Mitogen Activated Protein Kinase (MAPK)), Extracellular signal-Regulated Kinase (ERK) and nuclear factor kappa-light-chain-enhancer of activated B cells (NFκB). This function is also independent of XBP1 and is achieved by the kinase domain of activated IRE1α, which recruits the TNF receptor-associated factor 2 (TRAF2) adaptor protein [79]. Recruitment of TRAF2 leads to the subsequent recruitment of further accessory proteins including Apoptosis signal-regulating kinase 1 (ASK1) and IκB kinase (IKK) which aid in the recruitment and activation by phosphorylation of the proapoptotic proteins JNK, ERK and NFκB [80,81]. This IRE1α pathway generally occurs at a late stage in the ER stress response when the cell has exhausted all possibilities for avoiding apoptotic cell death.

[0016] The inventors have surprisingly discovered that the interaction between IRE1α and Hsp70 is responsible for controlling all three of these roles of IRE1α. Therefore, by altering the interaction between Hsp70 and IRE1α, the pathways controlled by IRE1α can be altered.

[0017] For example, by increasing the interaction between Hsp70 and IRE1α, the amount of XBP1s can be increased. This results in the upregulation of genes involved in the UPR whose expression is controlled by XBP1s, and a reduction in apoptosis.

[0018] In some embodiments, XBP1s may only be upregulated in response to conditions of cellular stress. Conditions of cellular stress include changes in ER calcium concentration (thapsigargin, calcium ionophore), the disruption of glycosylation (using tunicamycin), the inhibition of ER to Golgi transport (e.g. using brefeldin A), conditions that increase ER protein load (e.g. viral infection), pathological conditions where protein load in the ER increases (e.g. viral infection, accumulation of mutated proteins) and metabolic stress (e.g. exposure to anoxia and ischemia).

[0019] In other embodiments, by disrupting the interaction between Hsp70 and IRE1α, the level of JNK activation can be decreased. Since activated JNK leads to enhancement of a pro-apoptotic signalling pathway, disrupting the interaction between Hsp70 and IRE1α, leads to a reduction in apoptosis.

### IRE1α

[0020] As discussed above, IRE1α (SEQ ID NO: 6) is a Ser/Thr protein kinase and endoribonuclease that, in response to cellular stress, initiates the unconventional splicing of XBP1 to form the highly active transcription factor XBP1s.

[0021] Included within the definition of IRE1α used herein are proteins having 50%, 60%, 70%, 80%, 85%, 90%, 95%, 96%, 97%, 98%, 99% or more sequence identity to SEQ ID NO: 6.

[0022] The definition of IRE1α used herein also encompassed fragments of SEQ ID NO: 6. Such fragments may be 100, 200, 300, 400, 500, 600, 700, 800, 900, 950, 960 or more amino acids in length. Also included within the definition of fragments are amino acid sequences which correspond to SEQ ID NO: 6 and have a truncation at the N-terminus and/or the C-terminus. The truncation may be 1, 2, 3, 4, 5, 6, 7, 8, 9, 10, 20, 30, 40, 50, 60, 70, 80, 90, 100, 150, 200 or more amino acids in length. The truncation may be an internal deletion with the same characteristics.

[0023] The term IRE1α also encompasses proteins comprising the amino acid sequence of SEQ ID NO: 6 or fragments or truncates thereof.

[0024] Fusion proteins comprising the amino acid sequence of SEQ ID NO: 6, or fragments or truncates thereof and a heterologous fusion partner are also contemplated. The fusion partner may be a viral fusion partner. Examples of suitable fusion partners include the HIV-1 TAT protein, the herpes simplex virus 1 (HSV-1) DNA-binding protein VP22, the Drosophila Antennapedia (Antp) homeotic transcription factor, albumin and an Fc region.

### Hsp70

[0025] As discussed above, the HSP70 family consists of at least 12 members which function as protein chaperones. [1,2]. Within the scope of the present invention, the Hsp70 can be Hsp70 (SEQ ID NO: 10), Hsp70 (SEQ ID NO: 12), Hsp70-2 (SEQ ID NO: 14), Hsp70-4 (SEQ ID NO: 16), Hsp70-4L (SEQ ID NO: 18), Hsp70-6 (SEQ ID NO: 20), Hsp70-7 (SEQ ID NO: 22), Hsp70-9 (SEQ ID NO: 24), Hsp70-12a (SEQ ID NO: 26), or Hsp70-14 (SEQ ID NO: 28).

[0026] In one embodiment the Hsp70 may be Hsp72 (SEQ ID NO: 8).

[0027] Included within the definition of Hsp70 used herein are proteins having 50%, 60%, 70%, 80%, 85%, 90%, 95%, 96%, 97%, 98%, 99% or more sequence identity to any one of SEQ ID NOs: 8, 10, 12, 14, 16, 18, 20, 22, 24, 26, or 28.

[0028] The definition of Hsp70 used herein also encompasses fragments of any one of SEQ ID NOs: 8, 10, 12, 14, 16, 18, 20, 22, 24, 26, or 28. Such fragments may be 100, 200, 300, 400, 500, 600, 700, 800, 850, 860 or more amino acids in length. Also included within the definition of fragments are amino acid sequences which correspond to any one of SEQ ID NOs: 8, 10, 12, 14, 16, 18, 20, 22, 24, 26, or 28 and have a truncation at the N-terminus and/or the C-terminus. The truncation may be 1, 2, 3, 4, 5, 6, 7, 8, 9, 10, 20, 30, 40, 50, 60, 70, 80, 90, 100, 150, 200 or more amino acids in length. The truncation may be an internal deletion with the same characteristics.

[0029] The term Hsp70 also encompasses proteins comprising the amino acid sequence of any one of SEQ ID NOs: 8, 10, 12, 14, 16, 18, 20, 22, 24, 26, or 28 or fragments or truncates thereof.

[0030] Fusion proteins comprising the amino acid sequence of any one of SEQ ID NOs: 8, 10, 12, 14, 16, 18, 20, 22, 24, 26, or 28, or fragments or truncates thereof and a heterologous fusion partner are also contemplated. The fusion partner may be a viral fusion partner. Examples of suitable fusion partners include the HIV-1 TAT, protein, the herpes simplex virus 1 (HSV-1) DNA-binding protein VP22, the Drosophila Antennapedia (Antp) homeotic transcription factor, albumin and an Fc region.

### XBP1

[0031] As discussed above, XPB1 (SEQ ID NO: 2) is a protein positioned downstream of IRE1α in the UPR cascade. Under conditions of cellular stress IRE1α causes the XBP1 mRNA to be unconventionally spliced. A frame shift which occurs following this unconventional splicing produces the protein XBP1s (SEQ ID NO: 4). This is a longer protein (compared to conventionally spliced XBP1, SEQ ID NO: 2) which functions as a highly active transcription factor, and controls the expression of proteins further down the UPR cascade.

[0032] Included within the definition of XBP1 used herein are proteins having 50%, 60%, 70%, 80%, 85%, 90%, 95%, 96%, 97%, 98%, 99% or more sequence identity to SEQ ID NO: 4.

[0033] The definition of XBP1 used herein also encompasses fragments of SEQ ID NO: 4. Such fragments may be 50, 100, 200, 300, 350, 370 or more amino acids in length. Also included within the definition of fragments are amino acid sequences which correspond to SEQ ID NO: 4 and have a truncation at the N-terminus and/or the C-terminus. The truncation may be 1, 2, 3, 4, 5, 6, 7, 8, 9, 10, 20, 30, 40, 50, 60, 70, 80, 90, 100, 150, 200 or more amino acids in length. The truncation may be an internal deletion with the same characteristics.

[0034] The term XBP1 also encompasses proteins comprising the amino acid sequence of SEQ ID NO: 4 or fragments or truncates thereof.

[0035] Fusion proteins comprising the amino acid sequence of SEQ ID NO: 4, or fragments or truncates thereof and a heterologous fusion partner are also contemplated. The fusion partner may be a viral fusion partner. Examples of suitable fusion partners include the HIV-1 TAT protein, the herpes simplex virus 1 (HSV-1) DNA-binding protein VP22, the Drosophila Antennapedia (Antp) homeotic transcription factoralbumin and an Fc region.

### JNK

[0036] As discussed above, JNK is a protein positioned downstream of IRE1α in the UPR cascade. Under conditions of extreme cellular stress activated IRE1α recruits TRAF2, which in turn recruits JNK and associated accessory proteins such as ASK 1 and IKK. The formation of this complex leads to JNK activation by phosphorylation.

[0037] JNK proteins are encoded by three genes known as JNK1 (MAPK8), JNK2 (MAPK9), and JNK3 (MAPK10). Through alternative splicing these three genes generate 13 isoforms of JNK known as JNK1-α1 (SEQ ID NO: 38, also known as MAPK8-α1), JNK1-β1 (SEQ 1N NO: 39, also known as MAPK8β1, JNK1-β2 (SEQ ID NO: 40, also known as MAPK8-β2), JNK1-α2 (SEQ ID NO: 41, also known as MAPK8-α2), (SEQ ID NO: 43, also known as MAPK9-α1), JNK2-α1 (SEQ 1N NO: 44, also known as MAPK9-β1, JNK2-α2 (SEQ ID NO: 45, also known as MAPK9-α2), JNK2-β2 (SEQ ID NO: 46, also known as MAPK9-β2), JNK2-1 (SEQ ID NO: 47, also known as MAPK9-γ), JNK3 isoform 1 (SEQ ID NO: 49, also known as MAPK10 isoform 1), JNK3 isoform 2 (SEQ ID NO: 50, also known as MAPK10 isoform 2), JNK3 isoform 3 (SEQ ID NO: 51, also known as MAPK10 isoform 3) and JNK3 isoform 4 (SEQ ID NO: 52, also known as MAPK10 isoform 4)

[0038] Included within the definition of JNK used herein are proteins having 50%, 60%, 70%, 80%, 85%, 90%, 95%, 96%, 97%, 98%, 99% or more sequence identity to any one of SEQ ID NOs: 38, 39, 40, 41, 43, 44, 45, 46, 47, 49, 50, 51 or 52.

[0039] The definition of JNK used herein also encompasses fragments of any one of SEQ ID NOs: 38, 39, 40, 41, 43, 44, 45, 46, 47, 49, 50, 51 or 52. Such fragments may be 50, 100, 200, 250 or more amino acids in length. Also included within the definition of fragments are amino acid sequences which correspond to any one of SEQ ID NOs: 38, 39, 40, 41, 43, 44, 45, 46, 47, 49, 50, 51 or 52 and have a truncation at the N-terminus and/or the C-terminus. The truncation may be 1, 2, 3, 4, 5, 6, 7, 8, 9, 10, 20, 30, 40, 50, 60, 70, 80, 90, 100, 150, 200 or more amino acids in length. The truncation may be an internal deletion with the same characteristics.

[0040] The term JNK also encompasses proteins comprising the amino acid sequence of any one of SEQ ID NOs: 38, 39, 40, 41, 43, 44, 45, 46, 47, 49, 50, 51 or 52 or fragments or truncates thereof.

[0041] Fusion proteins comprising the amino acid sequence of any one of SEQ ID NOs: 38, 39, 40, 41, 43, 44, 45, 46, 47, 49, 50, 51 or 52, or fragments or truncates thereof and a heterologous fusion partner are also contemplated. The fusion partner may be a viral fusion partner. Examples of suitable fusion partners include the HIV-1 TAT protein, the herpes simplex virus 1 (HSV-1) DNA-binding protein VP22, the Drosophila Antennapedia (Antp) homeotic transcription factoralbumin and an Fc region.

[0042] Herein, the term “activated JNK” is used to refer to JNK which is capable of functioning to increase apoptotic signalling relative to non-activated JNK. Activated JNK may be phosphorylated at one or more positions.

Interaction of Hsp70 with IRE1α

[0043] The inventors have surprisingly discovered that Hsp70 interacts with IRE1α (see examples 4 and 5 and FIG. 5). This interaction increases the non-conventional splicing of XBP1 and results in increased levels of XBP1s (see examples 2 and 3 and FIGS. 3 and 4). This interaction also increases the activation of JNK through the increased recruitment of TRAF2 and other accessory proteins.

[0044] The interaction between Hsp70 and IRE1α may be an electrostatic interaction, a Van der Waals interaction, an ionic interaction, a covalent interaction or a stoichiometric interaction. Alternatively, the interaction between Hsp70 and IRE1α may be formed by a combination of these interactive forces.

[0045] The areas of Hsp70 and IRE1α which are required for interaction have also been determined (see example 4 and FIG. 5), and have been identified as the ATPase domain of Hsp70 and the cytosolic C-terminal domain of IRE1α. Therefore, in one embodiment the interaction may be formed with the ATPase domain of Hsp70. In another embodiment, the interaction may be formed with the cytosolic C-terminal domain of IRE1α. The interaction of Hsp70 and IRE1α may require the hydrolysis of ATP. ATP hydrolysis may be facilitated by the ATPase domain of Hsp70.

### Cofactors of Hsp70

[0046] It is known that a number of cofactors are required for Hsp70 function [78]. Therefore, in order to interact with and/or for the optimal activation of IRE1α, one or more cofactors may be required. In one embodiment, the cofactors may include, but are not limited to, Hsp40, Hop, Bag 1-5, Hip, HspBP1, CHIP, SGT, Hsp110 homologs, Tom70, and TPR1.

### Method of Generating a Cell for Protein Production

[0047] Following the discovery that Hsp70 interacts with IRE1α, and that this interaction increases the levels of XBP1s, leading to a reduced apoptotic rate, the inventors discovered that this principle could be used to enhance protein production in a cellular system.

### Generating a Cell for Protein Production Having Increased Levels of XBP1s

[0048] In one embodiment the invention provides a method of generating a cell for protein production, the method comprising a step of manipulating the cell to increase the level of interaction between Hsp70 and IRE1α, such that the level of unconventionally-spliced XBP1 (XBP1s) mRNA rises.

[0049] By “such that the level of unconventionally-spliced XBP1 (XBP1s) mRNA rises” is meant that the amount of XBP mRNA present in a manipulated cell is more than the amount of XBP1s mRNA present in an un-manipulated cell. The level of XBP mRNA in a manipulated cell may be 2-fold, 3-fold, 4-fold, 5-fold, 6-fold, 7-fold, 8-fold, 9-fold, 10-fold, 15-fold, 20-fold, 50-fold, 100-fold, 200-fold, 500-fold or more greater than the level of XBP1s mRNA in an un-manipulated cell. This definition applies to all embodiments of the invention.

[0050] The increase in the level of XBP1s will lead to an increase in the expression of key UPR genes and to a reduction in the rate of apoptosis. This allows the cell to continue growing in cell culture under conditions of cellular stress. In one embodiment the cellular stress experienced during cell culture may be caused by changes in ER calcium concentration (thapsigargin, calcium ionophore), the disruption of glycosylation (using tunicamycin), the inhibition of ER to Golgi transport (e.g. using brefeldin A), conditions that increase ER protein load (e.g. viral infection), pathological conditions where protein load in the ER increases (e.g. viral infection, accumulation of mutated proteins) and metabolic stress (e.g. exposure to anoxia and ischemia).

[0051] The reduced apoptotic rate will allow the cells to produce an increased yield of a protein or proteins of interest. In one embodiment the cell may produce 2-fold, 3-fold, 4-fold, 5-fold, 6-fold, 7-fold, 8-fold, 9-fold, 10-fold, 15-fold, 20-fold or more of a protein of interest than a control cell which has not been manipulated.

[0052] In one embodiment the increase in protein yield may be due to an increased level of mRNA. The cell may express the protein of interest at a level of 1, 2, 3, 4, 5, 10, 15, 20, 30, 40, 50, 60, 70, 80, 90, 100, 150, 200, 500, 1000, 10,000 or more mRNA copies per cell relative to the expression level of GAPDH mRNA. The normalisation of the expression level relative to GAPDH is a procedure well known to those skilled in the art.

[0053] In one embodiment the Hsp70 may be Hsp72. As described above, Hsp72 has the sequence depicted in SEQ ID NO: 8. Within the scope of the invention, Hsp72 may be a homologue, fragment or fusion protein, as described above.

[0054] The skilled person will understand that many mechanisms are known in the art through which the level of the newly identified interaction between Hsp70 and IRE1α can be increased.

[0055] In one embodiment the level of interaction between Hsp70 and IRE1α can be increased by increasing the level of expression of Hsp70 and/or IRE1α within the cell. This may involve increasing the level of expression of Hsp70, increasing the level of expression of IRE1α or increasing the level of expression of Hsp70 and IRE1α.

[0056] The level of expression of Hsp70 and/or IRE1α may be increased by 2-fold, 3-fold, 4-fold, 5-fold, 6-fold, 7-fold, 8-fold, 9-fold, 10-fold, 15-fold, 20-fold or more when compared to a control cell which has not been manipulated.

[0057] In one embodiment the increase in protein yield may be due to an increased level of mRNA. The cell may express the protein of interest at a level of 1, 2, 3, 4 5, 10, 15, 20, 30, 40, 50, 60, 70, 80, 90, 100, 150, 200, 500, 1000, 10,000 or more mRNA copies per cell relative to the expression level of GAPDH mRNA. The normalisation of the expression level relative to GAPDH is a procedure well known to those skilled in the art.

[0058] In one embodiment, the step of manipulating the cell may include transfecting the cell with a vector containing a nucleic acid encoding Hsp70 or IRE1α. Vectors suitable for use in the method of the invention include plasmids and viruses (including both bacteriophage and eukaryotic viruses), as well as other linear or circular DNA carriers, such as those employing transposable elements or homologous recombination technology. Particularly suitable viral vectors include baculovirus-, lentivirus-, adenovirus- and vaccinia virus-based vectors.

[0059] Suitable transformation or transfection techniques are well known in the art [68]. Within the scope of the invention any method of transfection may be used, including but not limited to calcium phosphate coprecipitation, DEAE dextran facilitated transfection, electroporation, microinjection, cationic liposomes and retroviruses. In eukaryotic cells, expression systems may either be transient (e.g. episomal) or permanent (chromosomal integration) according to the needs of the system.

[0060] In one embodiment transfection may be carried out using cationic lipids such as Lipofectamine 2000, Fugene, Turbofect etc. according to manufacturer's instructions.

[0061] In another embodiment the method may comprise inserting a strong promoter that is transcriptionally linked to the endogenous gene encoding Hsp70 or IRE1α. A strong promoter is defined as a promoter which is capable of driving the rapid and robust expression of a protein. An example of a strong promoter which may be used within the context of the invention is the Cytomegalovirus (CMV) promoter. In some embodiments the strong promoter may be associated with additional enhancer elements.

[0062] A strong promoter may be inserted into the chromosome of the cell by any method known in the art. The promoter, and any enhancer elements, may be inserted by a method of homologous recombination or by a method of site-specific, directed recombination. The strong promoter should be inserted so that it is transcriptionally linked to the endogenous gene encoding Hsp70 or IRE1α such that following insertion of the strong promoter into the cell's chromosome, expression of Hsp70 or IRE1α is increased.

[0063] In one embodiment, the expression of co-factors of Hsp70 may also be increased by the insertion of a strong promoter that is transcriptionally linked to the endogenous gene encoding the co-factor. The methods for inserting a strong promoter that is transcriptionally linked to the endogenous gene encoding the co-factor may be the same as the methods used for inserting a strong promoter that is transcriptionally linked to the endogenous gene encoding Hsp70 or IRE1α.

[0064] XBP1 splicing is thought to occur in the cytoplasm, and the invention therefore also contemplates increasing the nuclear localisation of XBP1s following unconventional splicing, by the methods discussed above [73].

[0065] In another embodiment, the interaction between IRE1α and Hsp70 may be increased by administering an antibody or small molecule to the cell which enhances the level of interaction between IRE1α and Hsp70.

[0066] In a further embodiment, the apparent level of interaction been IRE1α and Hsp70 may be increased by administering to the cell an antibody or small molecule which binds to IRE1α and mimics the interaction of Hsp70 with IRE1α.

[0067] Within these embodiments, the term antibody includes full chain antibodies and antibody fragments. These include antibody heavy chains, antibody light chains, Fc regions, Fab regions and single chain antibodies. Also contemplated is the use of humanised antibodies, wherein CDR sequences and certain framework residues from a non-human antibody are maintained, and the rest of the antibody residues are substituted for human residues. Methods for the production and humanisation of antibodies are well known in the art.

[0068] In one embodiment, the antibody may be a monoclonal antibody.

[0069] As it has been determined that Hsp70 and IRE1α interact through the ATPase domain of Hsp70 and the cytosolic C-terminal domain of IRE1α, the antibodies or small molecules for use in these embodiments may be directed against these domains.

### Generating a Cell for Protein Production Having Decreased Levels of Activated JNK

[0070] The discovery that the interaction between Hsp70 and IRE1α also controls JNK activation can also be used to enhance protein production in a cellular system.

[0071] In one embodiment the invention provides a method of generating a cell for protein production, the method comprising a step of manipulating the cell to decrease the level of interaction between Hsp70 and IRE1α, such that the level of activated JNK or the level of JNK activation decreases.

[0072] By “such that the level of activated JNK or the level of JNK activation decreases” is meant that the level of activated JNK or the level of JNK activation present in a manipulated cell is more than the level of activated JNK or the level of JNK activation present in an un-manipulated cell. “Activated JNK” is JNK which is in a form in which it has endoribonuclease activity, and may mean that the JNK molecule is in oligomeric form and/or has been phosphorylated. By “level of JNK activation” is meant the proportion of JNK which is in an active form. The level of activated JNK or the level of JNK activation in a manipulated cell may be 2-fold, 3-fold, 4-fold, 5-fold, 6-fold, 7-fold, 8-fold, 9-fold, 10-fold, 15-fold, 20-fold, 50-fold, 100-fold, 200-fold, 500-fold or more greater than the level of XBP1s mRNA in an un-manipulated cell. This definition applies to all embodiments of the invention.

[0073] The decrease in the level of activated JNK or the level of JNK activation will lead to a reduction in the rate of apoptosis. This allows the cell to continue growing in cell culture under conditions of cellular stress. In one embodiment the cellular stress experienced during cell culture may be caused by changes in ER calcium concentration (thapsigargin, calcium ionophore), the disruption of glycosylation (using tunicamycin), the inhibition of ER to Golgi transport (e.g. using brefeldin A), conditions that increase ER protein load (e.g. viral infection), pathological conditions where protein load in the ER increases (e.g. viral infection, accumulation of mutated proteins) and metabolic stress (e.g. exposure to anoxia and ischemia).

[0074] The skilled person will understand that there are many ways in which the level of interaction between Hsp70 and IRE1α can be reduced. In one embodiment, the level of interaction may be reduced by administering an Hsp70 neutralising agent or an IRE1α neutralising agent to the cell.

[0075] The level of Hsp70 and/or IRE1α may be reduced by 2-fold, 3-fold, 4-fold, 5-fold, 6-fold, 7-fold, 8-fold, 9-fold, 10-fold, 15-fold, 20-fold or more when compared to a control cell which has not been manipulated.

[0076] In one embodiment the decrease in protein yield may be due to a decreased level of mRNA. The level of Hsp70 and/or IRE1α mRNA may be reduced to a level of 10⁻¹, 10⁻², 10⁻³, 10⁻⁴, 10⁻⁵, 10⁻⁶ or less mRNA copies per cell relative to the expression level of GAPDH mRNA. The normalisation of the expression level relative to GAPDH is a procedure well known to those skilled in the art.

[0077] It will be appreciated that both Hsp70 and IRE1α are involved in complicated pathways within cells, and that both of these proteins have many functions. Therefore, neutralising each of the various functions of either or both of these proteins is likely to have negative effects on a cell. At present it is unclear what the precise effects of a complete neutralisation of either of these proteins would be.

[0078] In view of the potential negative effects on the cell, the skilled person would understand that the “neutralising agent” referred to herein is an agent which is capable of disrupting the interaction between Hsp70 and IRE1α. Such a neutralising agent does not necessarily disrupt or affect any of the other functions and properties of these proteins.

[0079] In certain embodiments the neutralising agent may be an Hsp70 neutralising agent or an IRE1α neutralising agent. By this is meant that the neutralising agent is directed to either Hsp70 or IRE1α, respectively. Through this, the neutralising agent is able to disrupt the interaction between Hsp70 and IRE1α, thus decreasing the level of activated JNK or the level of JNK activation.

[0080] The inventors have determined that the ATPase domain of Hsp70 and the cytosolic C-terminal region of IRE1α are both required for the interaction between Hsp70 and IRE1α.

[0081] It is therefore considered that the ATPase domain of Hsp70 is the point at which Hsp70 interacts with IRE1α. Accordingly, an Hsp70 neutralising agent may be directed to the ATPase domain of Hsp70. As depicted in FIG. 5B, the ATPase domain of Hsp70 is defined as amino acids 1-383 of the amino acid sequence of Hsp72 (SEQ ID NO: 8). Therefore, an Hsp70 neutralising agent may be directed towards, and may bind to, one or more of amino acid residues 1-383 of Hsp70.

[0082] Alternatively, the ATPase domain of Hsp70 may be required for the interaction with IRE1α because ATP hydrolysis is required for the formation of the interaction.

[0083] The cytosolic C-terminal region of IRE1α has been identified as the point at which IRE1α interacts with Hsp70. Accordingly, an IRE1α neutralising agent may be directed to the cytosolic C-terminal region of IRE1α. As depicted in FIG. 5A, the cytosolic C-terminal region of IRE1α is defined as amino acids 500-967 of the amino acid sequence of IRE1α (SEQ ID NO: 16). Therefore, an IRE1α neutralising agent may be directed towards, and may bind to one or more of amino acid residues 500-967 of IRE1α.

[0084] In one embodiment the Hsp70 neutralising agent may be an anti-Hsp70 antibody. The term antibody includes full chain antibodies and antibody fragments. These include antibody heavy chains, antibody light chains, Fc regions, Fab regions and single chain antibodies. Also contemplated is the use of humanised antibodies, wherein CDR sequences and certain framework residues from a non-human antibody are maintained, and the rest of the antibody residues are substituted for human residues. Methods for the production and humanisation of antibodies are well known in the art.

[0085] In one embodiment, the antibody may be a monoclonal antibody.

[0086] An Hsp70 neutralising antibody for use according to the invention may be directed against one or more residues from the ATPase domain of Hsp70. An IRE1α neutralising antibody may be directed against the cytosolic C-terminal domain of IRE1α.

[0087] In other embodiments, the Hsp70 neutralising agent may be a small molecule inhibitor of Hsp70. These include VER-155008 [74], 17-dimethylaminoethylamino-17-demethoxygeldanamycin (17-DMAG) [75], 2-Phenylethylnesulfonamide (PES) [76,77], 17-alkyal-amino-17-demethoxygeldanamycin (17-AAG) [77].

[0088] The Hsp70 neutralising agent or the IRE1α neutralising agent may also be a peptide aptamer, DNA aptamer, RNA aptamer or siRNA molecule.

### Expressed Protein

[0089] The protein to be expressed by the cell may be a therapeutic or vaccine protein. In one embodiment such proteins may include insulin and erythropoietin.

[0090] In one embodiment the protein to be expressed by the cell may be a secreted protein or a membrane protein such as cytokines, interferons, streptokinase, urokinase etc.

### Cell for Protein Production

[0091] The cell for protein production may be a eukaryotic cell. Where the cell is a eukaryotic cell it may be a fungal cell (e.g. yeast; S. cerevisiae, S. Pombe, P. Pastoris), a plant cell or an animal cell. Where the cell is an animal cell it may be a mammalian cell or an insect cell. Where the cell is a mammalian cell it may, for example, be a PC12 cell, a CHO cell, an NS0 cell, a BHK cell, a human retinal cell or an HEK-293 cell.

[0092] In one embodiment the method of the invention may comprise isolating the protein of interest from the cell preparation. Methods of isolation will be well known to a person skilled in the art, and any method of protein isolation may be utilised within the scope of the invention. In particular, the protein may be isolated by immunoprecipitation, immunoelectrophoresis, chromatographic methods, gel electrophoresis, centrifugal methods, or any combination of such methods.

[0093] The invention also includes a cell produced according to any of the methods of the invention.

### Methods of Treatment

### Methods of Treatment Requiring an Alteration in the Level of XBP1s

[0094] In another aspect the invention provides a method of treating disease, the method comprising a step of modulating the level of interaction between Hsp70 and IRE1α, such that the level of unconventionally-spliced XBP1 (XBP1s) mRNA is altered.

[0095] The term “modulating” includes any form of altering the level of interaction between Hsp70 and IRE1α including increasing the level of interaction between the two proteins and decreasing the level of interaction between the two proteins.

Treatment of Diseases Associated with a Decreased Level of Apoptosis

[0096] As discussed above, the interaction between Hsp70 and IRE1α causes the unconventional splicing of XBP1 such that the level of unconventionally-spliced XBP1 (XBP1s) mRNA is increased. Therefore, decreasing the level of interaction between Hsp70 and IRE1α, will lead to a reduction in the level of unconventionally-spliced XBP1 (XBP1s) mRNA.

[0097] A reduction in the level of XBP1s in a cell will lead to the reduced adaptive response initiated by IRE1/XBP1 branch of the UPR. Since the UPR functions to prevent cellular apoptosis, a reduction in this response will lead to cellular apoptosis. This can be advantageous for the treatment of disorders and diseases associated with a reduced rate of apoptosis. Therefore, the method of this aspect of the invention may be used to treat a disease or disorder associated with a reduced rate of apoptosis.

[0098] Cancer and metastatic disorders and diseases are particularly known for having a reduced rate of apoptosis. Following a series of events which trigger a cell to follow a metastatic pathway, the cell can become resistant to apoptosis, leading to tumour formation. This reduced rate of apoptosis may, in part, be due to an increase in the UPR, which allows cells to remain alive even under severely stressed conditions. Therefore, decreasing the interaction between Hsp70 and IRE1α, will lead to a reduction in the level of unconventionally-spliced XBP1 (XBP1s) mRNA, and a reduction in the UPR. This will allow cells to undergo apoptosis and will alleviate cancer and metastatic disorders and diseases.

[0099] The centre of a solid tumour is a particularly stressed environment for a cell due to the reduced oxygen levels and the potential for anoxia and hypoxia. In addition, the use of conventional chemotherapeutic drugs such as cisplatin, carboplatin, oxaliplatin, mechlorethamine, cyclophosphamide, chlorambucil, ifosfamide, vinca alkaloids such as vincristine, vinblastine, vinorelbine, or vindesine, taxanes such as taxol or docetaxel, camptothecins, irinotecan, topotecan, amsacrine, etoposide, etoposide phosphate, teniposide, doxorubicin, epirubicin, bleomycin, podophyllotoxin, etoposide, and teniposide can further increase the stressed nature of the environment within a solid tumour. Therefore, a reduction in the UPR by reducing the interaction between Hsp70 and IRE1α will enable cells living within such a stressed environment to proceed down the apoptotic pathway.

[0100] In one embodiment the cancer or metastatic disorder or disease may comprise a solid tumor.

[0101] In another embodiment the cancer or metastatic disorder or disease may be a carcinoma, a sarcoma, a lymphoma, multiple myeloma or a blastoma.

[0102] In another embodiment the cancer may be breast cancer, lung cancer, colon cancer, cervical cancer, prostate cancer, ovarian cancer, leukaemia, or bowel cancer.

[0103] The skilled person will understand that there are many ways in which the level of interaction between Hsp70 and IRE1α can be reduced. In one embodiment, the level of interaction may be reduced by administering an Hsp70 neutralising agent or an IRE1α neutralising agent to the affected cell.

[0104] The level of Hsp70 and/or IRE1α may be reduced by 2-fold, 3-fold, 4-fold, 5-fold, 6-fold, 7-fold, 8-fold, 9-fold, 10-fold, 15-fold, 20-fold or more when compared to a control subject.

[0105] In one embodiment the decrease in protein yield may be due to a decreased level of mRNA. The level of Hsp70 and/or IRE1α mRNA may be reduced to a level of 10⁻¹, 10⁻², 10⁻³, 10⁻⁴, 10⁻⁵, 10⁻⁶ or less mRNA copies per cell relative to the expression level of GAPDH mRNA. The normalisation of the expression level relative to GAPDH is a procedure well known to those skilled in the art.

[0106] It will be appreciated that both Hsp70 and IRE1α are involved in complicated pathways within cells, and that both of these proteins have many functions. Therefore, neutralising each of the various functions of either or both of these proteins is likely to have negative effects on a subject. At present it is unclear what the precise effects of a complete neutralisation of either of these proteins would be.

[0107] In view of the potential side effects, the skilled person would understand that the “neutralising agent” referred to herein is an agent which is capable of disrupting the interaction between Hsp70 and IRE1α. Such a neutralising agent does not necessarily disrupt or affect any of the other functions and properties of these proteins.

[0108] In certain embodiments the neutralising agent may be an Hsp70 neutralising agent or an IRE1α neutralising agent. By this is meant that the neutralising agent is directed to either Hsp70 or IRE1α, respectively. Through this, the neutralising agent is able to disrupt the interaction between Hsp70 and IRE1α.

[0109] The inventors have determined that the ATPase domain of Hsp70 and the cytosolic C-terminal region of IRE1α are both required for the interaction between Hsp70 and IRE1α.

[0110] It is therefore considered that the ATPase domain of Hsp70 is the point at which Hsp70 interacts with IRE1α. Accordingly, an Hsp70 neutralising agent may be directed to the ATPase domain of Hsp70. As depicted in FIG. 5B, the ATPase domain of Hsp70 is defined as amino acids 1-383 of the amino acid sequence of Hsp72 (SEQ ID NO: 8). Therefore, an Hsp70 neutralising agent may be directed towards, and may bind to one or more of amino acid residues 1-383 of Hsp70.

[0111] Alternatively, the ATPase domain of Hsp70 may be required for the interaction with IRE1α because ATP hydrolysis is required for the formation of the interaction.

[0112] The cytosolic C-terminal region of IRE1α has been identified as the point at which IRE1α interacts with Hsp70. Accordingly, an IRE1α neutralising agent may be directed to the cytosolic C-terminal region of IRE1α. As depicted in FIG. 5A, the cytosolic C-terminal region of IRE1α is defined as amino acids 500-967 of the amino acid sequence of IRE1α (SEQ ID NO: 16). Therefore, an IRE1α neutralising agent may be directed towards, and may bind to one or more of amino acid residues 500-967 of IRE1α.

[0113] In one embodiment the Hsp70 neutralising agent may be an anti-Hsp70 antibody. The term antibody includes full chain antibodies and antibody fragments. These include antibody heavy chains, antibody light chains, Fc regions, Fab regions and single chain antibodies. Also contemplated is the use of humanised antibodies, wherein CDR sequences and certain framework residues from a non-human antibody are maintained, and the rest of the antibody residues are substituted for human residues. Methods for the production and humanisation of antibodies are well known in the art.

[0114] In one embodiment, the antibody may be a monoclonal antibody.

[0115] An Hsp70 neutralising antibody for use according to the invention may be directed against one or more residues from the ATPase domain of Hsp70. An IRE1α neutralising antibody may be directed against the cytosolic C-terminal domain of IRE1α.

[0116] In other embodiments, the Hsp70 neutralising agent may be a small molecule inhibitor of Hsp70. These include VER-155008 [74], 17-dimethylaminoethylamino-17-demethoxygeldanamycin (17-DMAG) [75], 2-Phenylethylnesulfonamide (PES) [76,77], 17-alkyal-amino-17-demethoxygeldanamycin (17-AAG) [77].

[0117] The Hsp70 neutralising agent or the IRE1α neutralising agent may also be a peptide aptamer, DNA aptamer, RNA aptamer or siRNA molecule.

[0118] In one embodiment, the invention also provides an Hsp70 neutralising agent or an IRE1α neutralising agent for use in the treatment of cancer or a metastatic disease or disorder. The invention also provides the use of an Hsp70 neutralising agent or an IRE1α neutralising agent in the manufacture of a medicament for the treatment of cancer or a metastatic disease or disorder.

[0119] Also included within the scope of the invention is a pharmaceutical composition comprising an Hsp70 neutralising agent or an IRE1α neutralising agent as defined above and a pharmaceutically acceptable carrier, excipient, diluent or buffer.

[0120] The term “pharmaceutically acceptable carrier” may include liquids such as water, saline, glycerol, ethanol or auxiliary substances such as wetting or emulsifying agents, pH buffering substances and the like. Excipients may enable the pharmaceutical compositions to be formulated into tablets, pills, capsules, liquids, gels, or syrups to aid intake by the subject. A thorough discussion of pharmaceutically acceptable carriers is available in Remington's Pharmaceutical Sciences [69].

[0121] In one embodiment, the pharmaceutical composition may include an Hsp70 neutralising agent and an IRE1α neutralising agent. In another embodiment the pharmaceutical composition may include one or more Hsp70 neutralising agents and one or more IRE1α neutralising agents.

[0122] The pharmaceutical composition may also include one or more additional therapeutic agents. In particular the pharmaceutical composition may include one or more additional anti-cancer agents such as cisplatin, carboplatin, oxaliplatin, mechlorethamine, cyclophosphamide, chlorambucil, ifosfamide, vinca alkaloids such as vincristine, vinblastine, vinorelbine, or vindesine, taxanes such as taxol or docetaxel, camptothecins, irinotecan, topotecan, amsacrine, etoposide, etoposide phosphate, teniposide, doxorubicin, epirubicin, bleomycin, podophyllotoxin, etoposide, or teniposide.

[0123] In a further embodiment the pharmaceutical composition may comprise one or more further pro-apoptotic agents. Such agents include, TRAIL, TRAIL mutants including those described in WO2005/056596, WO2009/077857, WO/2009/066174, Bax, Bid, Bak, or Bad.

[0124] As used herein, the term “treatment” is considered to encompass therapy, and can be prophylactic or therapeutic.

[0125] The neutralising agents or pharmaceutical compositions described above may be used for the treatment of disease in any animal. The animal may be a mammal such as a cow, pig, camel, goat, sheep, cat, dog or rabbit. In one embodiment, the mammal may be a human.

[0126] The neutralising agent or pharmaceutical composition may be formulated as a pill, syrup, injectable solution, cream, ointment, suppository, pessary, spray, eye drop or the neutralising agent or pharmaceutical composition may be inserted into or coated onto a medical device useful for the treatment of a patient, such as a stent, stitch, rod or mesh.

[0127] The neutralising agent or pharmaceutical composition of the invention may be administered to a patient using one or more of a number of modes of administration which will be known to a person skilled in the art. Such modes of administration may include parenteral injection (e.g. intravenously, subcutaneously, intraperitoneally, intramuscularly, or to the interstitial space of a tissue), or by rectal, oral, vaginal, topical, transdermal, intradermal, intrathecal, intranasal, ocular, aural, pulmonary or other mucosal administration. The precise mode of administration will depend on the disease or condition to be treated.

Treatment Disorders Associated with Increased Apoptosis

[0128] An increase in the level of interaction between Hsp70 and IRE1α will lead to an increase in XBPs. This will lead to an increase in the UPR and to a reduction in the apoptotic rate. This can be useful for the treatment of a disorders or diseases associated with an increased rate of apoptosis. Therefore, in another aspect the invention provides a method of treating a disease or disorder associated with an increased rate of apoptosis by increasing the level of interaction between Hsp70 and IRE1α, such that the level of unconventionally-spliced XBP1 mRNA rises.

[0129] Autoimmune disorders and diseases, allergies or other hypersensitivity disorders, diabetes, cardiac disease, transplant rejection and graft-versus-host disease, and acute and chronic inflammatory diseases are particularly known for having an increased rate of apoptosis.

[0130] Within the scope of the invention the autoimmune disorders include but are not limited to achlorhydra autoimmune chronic active hepatitis, Addison's disease, alopecia greata, amyotrophic lateral sclerosis (ALS, Lou Gehrig's Disease), ankylosing spondylitis, anti-GBM nephritis or anti-TBM nephritis, antiphospholipid syndrome, aplastic anemia, arthritis, asthma, atopic allergy, atopic dermatitis, autoimmune Addison's disease, autoimmune hemolytic anemia, autoimmune hepatitis, autoimmune inner ear disease (AIED), autoimmune lymphoproliferative syndrome (ALPS), autoimmune thrombocytopenic purpura (ATP), Balo disease, Behcet's disease, Berger's disease (IgA Nephropathy), bullous pemphigoid, cardiomyopathy, celiac disease, celiac sprue dermatitis, chronic fatigue immune deficiency syndrome (CFIDS), chronic fatigue immune dysfunction syndrome (CFIDS), chronic inflammatory demyelinating polyneuropathy, Churg Strauss syndrome, cicatricial pemphigoid, Cogan's syndrome, cold agglutunin disease, colitis, cranial arteritis, CREST syndrome, Crohn's disease, Cushing's syndrome, Dego's disease, dermatitis, dermatomyositis, dermatomyositis—juvenile, Devic's disease, type 1 diabetes, discoid lupus, Dowling-Dego's disease, Dressler's syndrome, eosinophilic fasciitis, epidermolysis bullosa acquisita, essential mixed cryoglobulinemia, Evan's syndrome, fibromyalgia, fibromyositis, fibrosing alveolitis, gastritis, giant cell artertis, glomerulonephritis, Goodpasture's disease, Grave's disease, Guillian-Barre syndrome, Hashimoto's thyroiditis, hemolytic anemia, Henoch-Schonlein purpura, hepatitis, Hughes syndrome, idiopathic adrenal atrophy, idiopathic pulmonary fibrosis, idiopathic thrombocytopenia purpura (ITP), IgA nephropathy, inflammatory demylinating polyneuropathy, insulin dependent diabetes (Type I), irritable bowel syndrome, juvenile arthritis, Kawasaki's disease, lichen planus, Lou Gehrig's disease, lupoid hepatitis, Lyme disease, Meniere's disease, mixed connective tissue disease, multiple myeloma, multiple sclerosis, myasthenia gravis, myositis, ocular cicatricial pemphigoid, osteoporosis, pars planitis, pemphigus vulgaris, pernicious anemia, polyarteritis nodosa, polychondritis, polyglandular syndromes, polyglandular autoimmune syndromes, polymyalgia rheumatica (PMR), polymyositis, polymyositis and dermatomyositis, primary agammaglobulinemia, primary biliary cirrhois, primary biliary cirrhosis, primary sclerosing cholangitis, psoriasis, Raynaud's phenomenon, Reiter's syndrome, rheumatoid arthritis, sarcoidosis, scleritis, scleroderma, Sjogren's syndrome, sticky blood syndrome, stiff-man syndrome, Still's disease, Sydenham's chorea, systemic lupus erythmatosis (SLE), Takayasu's arteritis, temporal arteritis/giant cell arteritis, ulcerative colitis, uveitis, vasculitis, vitiligo, Wegener's granulomatosis, and Wilson's syndrome.

[0131] The allergy or hypersensitivity disorder may be any known allergy or hypersensitivity disorder including type I, type II, type III, or type IV according to the Gell-Coombs classification, and the less commonly defined type V hypersensitivity disorders. Such disorders include but are not limited to atopy, asthma, ertyhroblastosis fetalis, Goodpasture's syndrome, autoimmune hemolytic anemia, serum sickness, Arthus reaction, systemic lupus erythematosus, contact dermatitis, tuberculin skin test, chronic transplant rejection, Graves disease, myasthenia gravis, systemic anaphylaxis, local anaphylaxis, allergic rhinitis, conjunctivitis, gastroenteritis, eczema, blood transfusion reactions, haemolytic disease of the newborn, rheumatoid arthritis, glomerulonephritis, contact dermatitis, atopic dermatitis, tubercular lesions, drug-induced hemolytic anemia, lupus nephritis, aspergillosis, polyarteritis, polymyositis, scleroderma, hypersensitivity pneumonitis, Wegener's granulomastosis, type I diabetes mellitus, urticaria/angioedema, or inflammation of the thyroid. The allergy or hypersensitivity disorder may be associated with infectious diseases including but not limited to tuberculosis, leprosy, blastomycosis, histoplasmosis, toxoplasmosis, leishmaniasis or other infections. Allergies that may be treated include but are not limited to allergic reactions to pollens (e.g. birch tree, ragweed, oil seed rape), food (e.g. nuts, eggs or seafood), drugs (e.g. penicillin or salicylates), insect products (e.g. bee or wasp venom or house dust mites) or animal hair, and man-made products such as latex. Other inflammatory diseases that may be treated include atherosclerosis, Alzheimer's disease, vasculisitis, myositis, encephalitis, reperfusion injury and wound healing, including the inflammatory phase, the process of angiogenesis, fibroplasmia and epithelialisation, and the remodeling phase.

[0132] In one embodiment the method may comprise increasing the level of Hsp70 or IRE1α in a patient's cells. In another embodiment the method may comprise increasing the level of both Hsp70 and IRE1α.

[0133] The level of Hsp70 and/or IRE1α may be increased by 2-fold, 3-fold, 4-fold, 5-fold, 6-fold, 7-fold, 8-fold, 9-fold, 10-fold, 15-fold, 20-fold or more when compared to a control subject.

[0134] In one embodiment the increase in protein yield may be due to an increased level of mRNA. The cell may express the protein of interest at a level of 1, 2, 3, 4, 5, 10, 15, 20, 30, 40, 50, 60, 70, 80, 90, 100, 150, 200, 500, 1000, 10,000 or more mRNA copies per cell relative to the expression level of GAPDH mRNA. The normalisation of the expression level relative to GAPDH is a procedure well known to those skilled in the art.

[0135] In one embodiment the level of Hsp70 or IRE1α may be increased by administering an Hsp70 or IRE1α protein to the patient in need of treatment in a therapeutically effective amount.

[0136] The Hsp70 or IRE1α protein for administration to a patient may be formulated for administration in any pharmaceutically acceptable form.

[0137] If both Hsp70 and IRE1α are to be administered, these may be administered by separate, sequential or simultaneous administration.

[0138] In another embodiment the level of Hsp70 or IRE1α may be increased by increasing the level of expression of Hsp70 or IRE1α. This can be achieved by administering a vector encoding Hsp70 or IRE1α in a therapeutically effective amount to a patient in need of treatment. Vectors suitable for use in the method of the invention include plasmids and viruses (including both bacteriophage and eukaryotic viruses), as well as other linear or circular DNA carriers, such as those employing transposable elements or homologous recombination technology; and host cells including attenuated host cells. S. cerevisiae is an example of a suitable host cell. Particularly suitable viral vectors include baculovirus-, lentivirus-, adenovirus- and vaccinia virus-based vectors.

[0139] Expression vectors for use in the method of the invention may incorporate the appropriate transcriptional and translational control sequences, for example enhancer elements, promoter-operator regions, termination stop sequences, mRNA stability sequences, start and stop codons or ribosomal binding sites, linked in frame with the nucleic acid molecules of the invention. These control sequences are provided by way of example only, and are not intended to be limited.

[0140] In one embodiment, the level of interaction between Hsp70 and IRE1α may be increased by increasing the level of co-factors of Hsp70. Hsp40 is an example of such a co-factor. The level of cofactor may be increased by any of the methods described above in relation to Hsp70, including administering the protein to the subject, administering a vector encoding the protein to a subject and administering a nuclear localised version of the co-factor, or a vector encoding said co-factor, to a subject.

[0141] In another embodiment, the interaction between IRE1α and Hsp70 may be increased by administering an antibody or small molecule to the patient which enhances the level of interaction between IRE1α and Hsp70.

[0142] In a further embodiment, the apparent level of interaction been IRE1α and Hsp70 may be increased by administering to the patient an antibody or small molecule which binds to IRE1α and mimics the interaction of Hsp70 with IRE1α.

[0143] Within these embodiments, the term antibody includes full chain antibodies and antibody fragments. These include antibody heavy chains, antibody light chains, Fc regions, Fab regions and single chain antibodies. Also contemplated is the use of humanised antibodies, wherein CDR sequences and certain framework residues from a non-human antibody are maintained, and the rest of the antibody residues are substituted for human residues. Methods for the production and humanisation of antibodies are well known in the art.

[0144] In one embodiment, the antibody may be a monoclonal antibody.

[0145] As it has been determined that Hsp70 and IRE1α interact through the ATPase domain of Hsp70 and the cytosolic C-terminal domain of IRE1α, the antibodies or small molecules for use in these embodiments may be directed against these domains.

[0146] In certain embodiments the method of the invention may also comprise inducing cellular stress. The skilled person will understand that various types of cellular stress may be induced, including changes in ER calcium concentration (thapsigargin, calcium ionophore), the disruption of glycosylation (using tunicamycin), the inhibition of ER to Golgi transport (e.g. using brefeldin A), conditions that increase ER protein load (e.g. viral infection), pathological conditions where protein load in the ER increases (e.g. viral infection, accumulation of mutated proteins) and metabolic stress (e.g. exposure to anoxia and ischemia). Within the scope of the invention the method may include inducing cellular stress through inducing one or more of these stressed states. Medical conditions in which cellular stress is a feature require no methods for induction of cellular stress and are preferred conditions in which the present invention may be exploited. Such conditions are listed herein.

[0147] The invention also includes a pharmaceutical composition comprising the amino acid sequence of Hsp70 or a vector encoding Hsp70, or the amino acid sequence of IRE1α or a vector encoding IRE1α and a pharmaceutically acceptable carrier, excipient, diluent or buffer.

[0148] The term “pharmaceutically acceptable carrier” may include liquids such as water, saline, glycerol, ethanol or auxiliary substances such as wetting or emulsifying agents, pH buffering substances and the like. Excipients may enable the pharmaceutical compositions to be formulated into tablets, pills, capsules, liquids, gels, or syrups to aid intake by the subject. A thorough discussion of pharmaceutically acceptable carriers is available in Remington's Pharmaceutical Sciences [69].

[0149] In one embodiment the invention includes the Hsp70, IRE1α, or Hsp40 protein, nucleic acid encoding Hsp70, IRE1α, or Hsp40, or pharmaceutical composition described above for use in the treatment of autoimmune disorders and diseases, allergies or other hypersensitivity disorders, diabetes, cardiac disease, transplant rejection and graft-versus-host disease, and acute and chronic inflammatory diseases.

[0150] In another embodiment the invention includes the use of the Hsp70, IRE1α, or Hsp40 protein, nucleic acid encoding Hsp70, IRE1α, or Hsp40, or pharmaceutical composition described above in the manufacture of a medicament for the treatment of autoimmune disorders and diseases, allergies or other hypersensitivity disorders, diabetes, cardiac disease, transplant rejection and graft-versus-host disease, and acute and chronic inflammatory diseases.

[0151] As used herein, the term “treatment” is considered to encompass therapy, and can be prophylactic or therapeutic.

[0152] The Hsp70, IRE1α, or Hsp40 protein, nucleic acid encoding Hsp70, IRE1α, or Hsp40, or pharmaceutical composition described above may be used for the treatment of disease in any animal. The animal may be a mammal such as a cow, pig, camel, goat, sheep, cat, dog or rabbit. In one embodiment, the mammal may be a human.

[0153] The Hsp70, IRE1α, or Hsp40 protein, nucleic acid encoding Hsp70, IRE1α, or Hsp40, or pharmaceutical composition may be formulated as a pill, syrup, injectable solution, cream, ointment, suppository, pessary, spray, eye drop or the Hsp70, IRE1α, or Hsp40 protein, nucleic acid encoding Hsp70, IRE1α, or Hsp40 or pharmaceutical composition may be inserted into or coated onto a medical device useful for the treatment of a patient, such as a stent, stitch, rod or mesh.

[0154] The Hsp70, IRE1α, or Hsp40 protein, nucleic acid encoding Hsp70, IRE1α, or Hsp40, or pharmaceutical composition of the invention may be administered to a patient using any one or more of a number of modes of administration which will be known to a person skilled in the art. Such modes of administration may include parenteral injection (e.g. intravenously, subcutaneously, intraperitoneally, intramuscularly, or to the interstitial space of a tissue), or by rectal, oral, vaginal, topical, transdermal, intradermal, intrathecal, intranasal, ocular, aural, pulmonary or other mucosal administration. The precise mode of administration will depend on the disease or condition to be treated.

### Methods of Treatment Requiring an Alteration in the Level of Activated JNK

[0155] In another aspect the invention provides a method of treating disease, the method comprising a step of modulating the level of interaction between Hsp70 and IRE1α, such that the level or level of activated JNK is altered.

[0156] The term “modulating” includes any form of altering the level of interaction between Hsp70 and IRE1α including increasing the level of interaction between the two proteins and decreasing the level of interaction between the two proteins.

Treatment of Diseases Associated with a Decreased Level of Apoptosis

[0157] As discussed above, the interaction between Hsp70 and IRE1α causes the activation of JNK. Therefore, increasing the level of interaction between Hsp70 and IRE1α, will lead to an increase in the level of activated JNK or the level of activation of JNK.

[0158] An increase in the level of activated JNK or the level of activation of JNK in a cell will lead to increased apoptotic signalling and an increased rate of cellular apoptosis. This can be advantageous for the treatment of disorders and diseases associated with a reduced rate of apoptosis. Therefore, the method of this aspect of the invention may be used to treat a disease or disorder associated with a reduced rate of apoptosis.

[0159] Cancer and metastatic disorders and diseases are particularly known for having a reduced rate of apoptosis. Following a series of events which trigger a cell to follow a metastatic pathway, the cell can become resistant to apoptosis, leading to tumour formation. This reduced rate of apoptosis may, in part, be due to an increase in the UPR, which allows cells to remain alive even under severely stressed conditions. Therefore, increasing the interaction between Hsp70 and IRE1α, will lead to an increase in the level of activated JNK, and a relative reduction in the UPR. This will allow cells to undergo apoptosis and will alleviate cancer and metastatic disorders and diseases.

[0160] In one embodiment the cancer or metastatic disorder or disease may comprise a solid tumor.

[0161] In another embodiment the cancer or metastatic disorder or disease may be a carcinoma, a sarcoma, a lymphoma, multiple myeloma or a blastoma.

[0162] In another embodiment the cancer may be breast cancer, lung cancer, colon cancer, cervical cancer, prostate cancer, ovarian cancer, leukaemia, or bowel cancer.

[0163] The skilled person will understand that there are many ways in which the level of interaction between Hsp70 and IRE1α can be increased.

[0164] In one embodiment the method may comprise increasing the level of Hsp70 or IRE1α in a patient's cells. In another embodiment the method may comprise increasing the level of both Hsp70 and IRE1α.

[0165] The level of Hsp70 and/or IRE1α may be increased by 2-fold, 3-fold, 4-fold, 5-fold, 6-fold, 7-fold, 8-fold, 9-fold, 10-fold, 15-fold, 20-fold or more when compared to a control subject.

[0166] In one embodiment the increase in protein yield may be due to an increased level of mRNA. The cell may express the protein of interest at a level of 1, 2, 3, 4, 5, 10, 15, 20, 30, 40, 50, 60, 70, 80, 90, 100, 150, 200, 500, 1000, 10,000 or more mRNA copies per cell relative to the expression level of GAPDH mRNA. The normalisation of the expression level relative to GAPDH is a procedure well known to those skilled in the art.

[0167] In one embodiment the level of Hsp70 or IRE1α may be increased by administering an Hsp70 or IRE1α protein to the patient in need of treatment in a therapeutically effective amount.

[0168] The Hsp70 or IRE1α protein for administration to a patient may be formulated for administration in any pharmaceutically acceptable form.

[0169] If both Hsp70 and IRE1α are to be administered, these may be administered by separate, sequential or simultaneous administration.

[0170] In another embodiment the level of Hsp70 or IRE1α may be increased by increasing the level of expression of Hsp70 or IRE1α. This can be achieved by administering a vector encoding Hsp70 or IRE1α in a therapeutically effective amount to a patient in need of treatment. Vectors suitable for use in the method of the invention include plasmids and viruses (including both bacteriophage and eukaryotic viruses), as well as other linear or circular DNA carriers, such as those employing transposable elements or homologous recombination technology; and host cells including attenuated host cells. S. cerevisiae is an example of a suitable host cell. Particularly suitable viral vectors include baculovirus-, lentivirus-, adenovirus- and vaccinia virus-based vectors.

[0171] Expression vectors for use in the method of the invention may incorporate the appropriate transcriptional and translational control sequences, for example enhancer elements, promoter-operator regions, termination stop sequences, mRNA stability sequences, start and stop codons or ribosomal binding sites, linked in frame with the nucleic acid molecules of the invention. These control sequences are provided by way of example only, and are not intended to be limited.

[0172] In one embodiment, the level of interaction between Hsp70 and IRE1α may be increased by increasing the level of co-factors of Hsp70. Hsp40 is an example of such a co-factor. The level of cofactor may be increased by any of the methods described above in relation to Hsp70, including administering the protein to the subject, administering a vector encoding the protein to a subject and administering a nuclear localised version of the co-factor, or a vector encoding said co-factor, to a subject.

[0173] In another embodiment, the interaction between IRE1α and Hsp70 may be increased by administering an antibody or small molecule to the patient which enhances the level of interaction between IRE1α and Hsp70.

[0174] In a further embodiment, the apparent level of interaction been IRE1α and Hsp70 may be increased by administering to the patient an antibody or small molecule which binds to IRE1α and mimics the interaction of Hsp70 with IRE1α.

[0175] Within these embodiments, the term antibody includes full chain antibodies and antibody fragments. These include antibody heavy chains, antibody light chains, Fc regions, Fab regions and single chain antibodies. Also contemplated is the use of humanised antibodies, wherein CDR sequences and certain framework residues from a non-human antibody are maintained, and the rest of the antibody residues are substituted for human residues. Methods for the production and humanisation of antibodies are well known in the art.

[0176] In one embodiment, the antibody may be a monoclonal antibody.

[0177] As it has been determined that Hsp70 and IRE1α interact through the ATPase domain of Hsp70 and the cytosolic C-terminal domain of IRE1α, the antibodies or small molecules for use in these embodiments may be directed against these domains.

[0178] In certain embodiments the method of the invention may also comprise inducing cellular stress. The skilled person will understand that various types of cellular stress may be induced, including changes in ER calcium concentration (thapsigargin, calcium ionophore), the disruption of glycosylation (using tunicamycin), the inhibition of ER to Golgi transport (e.g. using brefeldin A), conditions that increase ER protein load (e.g. viral infection), pathological conditions where protein load in the ER increases (e.g. viral infection, accumulation of mutated proteins) and metabolic stress (e.g. exposure to anoxia and ischemia). Within the scope of the invention the method may include inducing cellular stress through inducing one or more of these stressed states. Medical conditions in which cellular stress is a feature require no methods for induction of cellular stress and are preferred conditions in which the present invention may be exploited. Such conditions are listed herein.

[0179] The invention also includes a pharmaceutical composition comprising the amino acid sequence of Hsp70 or a vector encoding Hsp70, or the amino acid sequence of IRE1α or a vector encoding IRE1α and a pharmaceutically acceptable carrier, excipient, diluent or buffer.

[0180] The team “pharmaceutically acceptable carrier” may include liquids such as water, saline, glycerol, ethanol or auxiliary substances such as wetting or emulsifying agents, pH buffering substances and the like. Excipients may enable the pharmaceutical compositions to be formulated into tablets, pills, capsules, liquids, gels, or syrups to aid intake by the subject. A thorough discussion of pharmaceutically acceptable carriers is available in Remington's Pharmaceutical Sciences [69].

[0181] In one embodiment the invention includes the Hsp70, IRE1α, or Hsp40 protein, nucleic acid encoding Hsp70, IRE1α, or Hsp40, or pharmaceutical composition described above for use in the treatment of cancer or a metastatic disease or disorder

[0182] In another embodiment the invention includes the use of the Hsp70, IRE1α, or Hsp40 protein, nucleic acid encoding Hsp70, IRE1α, or Hsp40, or pharmaceutical composition described above in the manufacture of a medicament for the treatment of cancer or a metastatic disease or disorder.

[0183] As used herein, the term “treatment” is considered to encompass therapy, and can be prophylactic or therapeutic.

[0184] The Hsp70, IRE1α, or Hsp40 protein, nucleic acid encoding Hsp70, IRE1α, or Hsp40, or pharmaceutical composition described above may be used for the treatment of disease in any animal. The animal may be a mammal such as a cow, pig, camel, goat, sheep, cat, dog or rabbit. In one embodiment, the mammal may be a human.

[0185] The Hsp70, IRE1α, or Hsp40 protein, nucleic acid encoding Hsp70, IRE1α, or Hsp40, or pharmaceutical composition may be formulated as a pill, syrup, injectable solution, cream, ointment, suppository, pessary, spray, eye drop or the Hsp70, IRE1α, or Hsp40 protein, nucleic acid encoding Hsp70, IRE1α, or Hsp40 or pharmaceutical composition may be inserted into or coated onto a medical device useful for the treatment of a patient, such as a stent, stitch, rod or mesh.

[0186] The Hsp70, IRE1α, or Hsp40 protein, nucleic acid encoding Hsp70, IRE1α, or Hsp40, or pharmaceutical composition of the invention may be administered to a patient using any one or more of a number of modes of administration which will be known to a person skilled in the art. Such modes of administration may include parenteral injection (e.g. intravenously, subcutaneously, intraperitoneally, intramuscularly, or to the interstitial space of a tissue), or by rectal, oral, vaginal, topical, transdermal, intradermal, intrathecal, intranasal, ocular, aural, pulmonary or other mucosal administration. The precise mode of administration will depend on the disease or condition to be treated.

Treatment Disorders Associated with Increased Apoptosis

[0187] A decrease in the level of interaction between Hsp70 and IRE1α will lead to an decrease in the level of activated JNK. This will lead to a decrease in the apoptotic rate. This can be useful for the treatment of a disorders or diseases associated with an increased rate of apoptosis. Therefore, in another aspect the invention provides a method of treating a disease or disorder associated with an increased rate of apoptosis by decreasing the level of interaction between Hsp70 and IRE1α, such that the level of activated JNK rises.

[0188] Autoimmune disorders and diseases, allergies or other hypersensitivity disorders, diabetes, cardiac disease, transplant rejection and graft-versus-host disease, and acute and chronic inflammatory diseases are particularly known for having an increased rate of apoptosis.

[0189] Within the scope of the invention the autoimmune disorders include but are not limited to achlorhydra autoimmune chronic active hepatitis, Addison's disease, alopecia greata, amyotrophic lateral sclerosis (ALS, Lou Gehrig's Disease), ankylosing spondylitis, anti-GBM nephritis or anti-TBM nephritis, antiphospholipid syndrome, aplastic anemia, arthritis, asthma, atopic allergy, atopic dermatitis, autoimmune Addison's disease, autoimmune hemolytic anemia, autoimmune hepatitis, autoimmune inner ear disease (AIED), autoimmune lymphoproliferative syndrome (ALPS), autoimmune thrombocytopenic purpura (ATP), Balo disease, Behcet's disease, Berger's disease (IgA Nephropathy), bullous pemphigoid, cardiomyopathy, celiac disease, celiac sprue dermatitis, chronic fatigue immune deficiency syndrome (CFIDS), chronic fatigue immune dysfunction syndrome (CFIDS), chronic inflammatory demyelinating polyneuropathy, Churg Strauss syndrome, cicatricial pemphigoid, Cogan's syndrome, cold agglutunin disease, colitis, cranial arteritis, CREST syndrome, Crohn's disease, Cushing's syndrome, Dego's disease, dermatitis, dermatomyositis, dermatomyositis—juvenile, Devic's disease, type 1 diabetes, discoid lupus, Dowling-Dego's disease, Dressler's syndrome, eosinophilic fasciitis, epidermolysis bullosa acquisita, essential mixed cryoglobulinemia, Evan's syndrome, fibromyalgia, fibromyositis, fibrosing alveolitis, gastritis, giant cell artertis, glomerulonephritis, Goodpasture's disease, Grave's disease, Guillian-Barre syndrome, Hashimoto's thyroiditis, hemolytic anemia, Henoch-Schonlein purpura, hepatitis, Hughes syndrome, idiopathic adrenal atrophy, idiopathic pulmonary fibrosis, idiopathic thrombocytopenia purpura (ITP), IgA nephropathy, inflammatory demylinating polyneuropathy, insulin dependent diabetes (Type I), irritable bowel syndrome, juvenile arthritis, Kawasaki's disease, lichen planus, Lou Gehrig's disease, lupoid hepatitis, Lyme disease, Meniere's disease, mixed connective tissue disease, multiple myeloma, multiple sclerosis, myasthenia gravis, myositis, ocular cicatricial pemphigoid, osteoporosis, pars planitis, pemphigus vulgaris, pernicious anemia, polyarteritis nodosa, polychondritis, polyglandular syndromes, polyglandular autoimmune syndromes, polymyalgia rheumatica (PMR), polymyositis, polymyositis and dermatomyositis, primary agammaglobulinemia, primary biliary cirrhois, primary biliary cirrhosis, primary sclerosing cholangitis, psoriasis, Raynaud's phenomenon, Reiter's syndrome, rheumatoid arthritis, sarcoidosis, scleritis, scleroderma, Sjogren's syndrome, sticky blood syndrome, stiff-man syndrome, Still's disease, Sydenham's chorea, systemic lupus erythmatosis (SLE), Takayasu's arteritis, temporal arteritis/giant cell arteritis, ulcerative colitis, uveitis, vasculitis, vitiligo, Wegener's granulomatosis, and Wilson's syndrome.

[0190] The allergy or hypersensitivity disorder may be any known allergy or hypersensitivity disorder including type I, type II, type III, or type IV according to the Gell-Coombs classification, and the less commonly defined type V hypersensitivity disorders. Such disorders include but are not limited to atopy, asthma, ertyhroblastosis fetalis, Goodpasture's syndrome, autoimmune hemolytic anemia, serum sickness, Arthus reaction, systemic lupus erythematosus, contact dermatitis, tuberculin skin test, chronic transplant rejection, Graves disease, myasthenia gravis, systemic anaphylaxis, local anaphylaxis, allergic rhinitis, conjunctivitis, gastroenteritis, eczema, blood transfusion reactions, haemolytic disease of the newborn, rheumatoid arthritis, glomerulonephritis, contact dermatitis, atopic dermatitis, tubercular lesions, drug-induced hemolytic anemia, lupus nephritis, aspergillosis, polyarteritis, polymyositis, scleroderma, hypersensitivity pneumonitis, Wegener's granulomastosis, type I diabetes mellitus, urticaria/angioedema, or inflammation of the thyroid. The allergy or hypersensitivity disorder may be associated with infectious diseases including but not limited to tuberculosis, leprosy, blastomycosis, histoplasmosis, toxoplasmosis, leishmaniasis or other infections. Allergies that may be treated include but are not limited to allergic reactions to pollens (e.g. birch tree, ragweed, oil seed rape), food (e.g. nuts, eggs or seafood), drugs (e.g. penicillin or salicylates), insect products (e.g. bee or wasp venom or house dust mites) or animal hair, and man-made products such as latex. Other inflammatory diseases that may be treated include atherosclerosis, Alzheimer's disease, vasculisitis, myositis, encephalitis, reperfusion injury and wound healing, including the inflammatory phase, the process of angiogenesis, fibroplasmia and epithelialisation, and the remodeling phase.

[0191] In one embodiment, the level of interaction may be reduced by administering an Hsp70 neutralising agent or an IRE1α neutralising agent to the affected cell.

[0192] The level of Hsp70 and/or IRE1α may be reduced by 2-fold, 3-fold, 4-fold, 5-fold, 6-fold, 7-fold, 8-fold, 9-fold, 10-fold, 15-fold, 20-fold or more when compared to a control subject.

[0193] In one embodiment the decrease in protein yield may be due to a decreased level of mRNA. The level of Hsp70 and/or IRE1α mRNA may be reduced to a level of 10⁻⁴, 10⁻², 10⁻³, 10⁻⁴, 10⁻⁵, 10⁻⁶ or less mRNA copies per cell relative to the expression level of GAPDH mRNA. The normalisation of the expression level relative to GAPDH is a procedure well known to those skilled in the art.

[0194] It will be appreciated that both Hsp70 and IRE1α are involved in complicated pathways within cells, and that both of these proteins have many functions. Therefore, neutralising each of the various functions of either or both of these proteins is likely to have negative effects on a subject. At present it is unclear what the precise effects of a complete neutralisation of either of these proteins would be.

[0195] In view of the potential side effects, the skilled person would understand that the “neutralising agent” referred to herein is an agent which is capable of disrupting the interaction between Hsp70 and IRE1α. Such a neutralising agent does not necessarily disrupt or affect any of the other functions and properties of these proteins.

[0196] In certain embodiments the neutralising agent may be an Hsp70 neutralising agent or an IRE1α neutralising agent. By this is meant that the neutralising agent is directed to either Hsp70 or IRE1α, respectively. Through this, the neutralising agent is able to disrupt the interaction between Hsp70 and IRE1α.

[0197] The inventors have determined that the ATPase domain of Hsp70 and the cytosolic C-terminal region of IRE1α are both required for the interaction between Hsp70 and IRE1α.

[0198] It is therefore considered that the ATPase domain of Hsp70 is the point at which Hsp70 interacts with IRE1α. Accordingly, an Hsp70 neutralising agent may be directed to the ATPase domain of Hsp70. As depicted in FIG. 5B, the ATPase domain of Hsp70 is defined as amino acids 1-383 of the amino acid sequence of Hsp72 (SEQ ID NO: 8). Therefore, an Hsp70 neutralising agent may be directed towards, and may bind to one or more of amino acid residues 1-383 of Hsp70.

[0199] Alternatively, the ATPase domain of Hsp70 may be required for the interaction with IRE1α because ATP hydrolysis is required for the formation of the interaction.

[0200] The cytosolic C-terminal region of IRE1α has been identified as the point at which IRE1α interacts with Hsp70. Accordingly, an IRE neutralising agent may be directed to the cytosolic C-terminal region of IRE1α. As depicted in FIG. 5A, the cytosolic C-terminal region of IRE1α is defined as amino acids 500-967 of the amino acid sequence of IRE1α (SEQ ID NO: 16). Therefore, an IRE1α neutralising agent may be directed towards, and may bind to one or more of amino acid residues 500-967 of IRE1α.

[0201] In one embodiment the Hsp70 neutralising agent may be an anti-Hsp70 antibody. The term antibody includes full chain antibodies and antibody fragments. These include antibody heavy chains, antibody light chains, Fc regions, Fab regions and single chain antibodies. Also contemplated is the use of humanised antibodies, wherein CDR sequences and certain framework residues from a non-human antibody are maintained, and the rest of the antibody residues are substituted for human residues. Methods for the production and humanisation of antibodies are well known in the art.

[0202] In one embodiment, the antibody may be a monoclonal antibody.

[0203] An Hsp70 neutralising antibody for use according to the invention may be directed against one or more residues from the ATPase domain of Hsp70. An IRE1α neutralising antibody may be directed against the cytosolic C-terminal domain of IRE1α.

[0204] In other embodiments, the Hsp70 neutralising agent may be a small molecule inhibitor of Hsp70. These include VER-155008 [74], 17-dimethylaminoethylamino-17-demethoxygeldanamycin (17-DMAG) [75], 2-Phenylethylnesulfonamide (PES) [76,77], 17-alkyal-amino-17-demethoxygeldanamycin (17-AAG) [77].

[0205] The Hsp70 neutralising agent or the IRE1α neutralising agent may also be a peptide aptamer, DNA aptamer, RNA aptamer or siRNA molecule.

[0206] In one embodiment, the invention also provides an Hsp70 neutralising agent or an IRE1α neutralising agent for use in the treatment of autoimmune disorders and diseases, allergies or other hypersensitivity disorders, diabetes, cardiac disease, transplant rejection and graft-versus-host disease, and acute and chronic inflammatory diseases.

[0207] The invention also provides the use of an Hsp70 neutralising agent or an IRE1α neutralising agent in the manufacture of a medicament for the treatment of autoimmune disorders and diseases, allergies or other hypersensitivity disorders, diabetes, cardiac disease, transplant rejection and graft-versus-host disease, and acute and chronic inflammatory diseases.

[0208] Also included within the scope of the invention is a pharmaceutical composition comprising an Hsp70 neutralising agent or an IRE1α neutralising agent as defined above and a pharmaceutically acceptable carrier, excipient, diluent or buffer. The term “pharmaceutically acceptable carrier” may include liquids such as water, saline, glycerol, ethanol or auxiliary substances such as wetting or emulsifying agents, pH buffering substances and the like. Excipients may enable the pharmaceutical compositions to be formulated into tablets, pills, capsules, liquids, gels, or syrups to aid intake by the subject. A thorough discussion of pharmaceutically acceptable carriers is available in Remington's Pharmaceutical Sciences [69].

[0209] In one embodiment, the pharmaceutical composition may include an Hsp70 neutralising agent and an IRE1α neutralising agent. In another embodiment the pharmaceutical composition may include one or more Hsp70 neutralising agents and one or more IRE1α neutralising agents.

[0210] The pharmaceutical composition may also include one or more additional therapeutic agents.

[0211] As used herein, the term “treatment” is considered to encompass therapy, and can be prophylactic or therapeutic.

[0212] The neutralising agents or pharmaceutical compositions described above may be used for the treatment of disease in any animal. The animal may be a mammal such as a cow, pig, camel, goat, sheep, cat, dog or rabbit. In one embodiment, the mammal may be a human.

[0213] The neutralising agent or pharmaceutical composition may be formulated as a pill, syrup, injectable solution, cream, ointment, suppository, pessary, spray, eye drop or the neutralising agent or pharmaceutical composition may be inserted into or coated onto a medical device useful for the treatment of a patient, such as a stent, stitch, rod or mesh.

[0214] The neutralising agent or pharmaceutical composition of the invention may be administered to a patient using one or more of a number of modes of administration which will be known to a person skilled in the art. Such modes of administration may include parenteral injection (e.g. intravenously, subcutaneously, intraperitoneally, intramuscularly, or to the interstitial space of a tissue), or by rectal, oral, vaginal, topical, transdermal, intradermal, intrathecal, intranasal, ocular, aural, pulmonary or other mucosal administration. The precise mode of administration will depend on the disease or condition to be treated.

### BRIEF DESCRIPTION OF FIGURES

[0215] FIG. 1. Hsp72 protects PC12 from apoptosis induced by ER stress. (A) Immunoblotting of total protein from indicated cells was performed using antibodies against Hsp72 and β-actin. (B) The control (Neo) and Hsp72 expressing (Hsp72) PC12 cells were treated (0.25 μM) Tg or (2 μg/ml) Tm for 48 h. Reduction in cell viability was determined by MTT assay. Average and error bars represent mean±SD from three independent experiments performed in triplicates. (C) Cells were treated as in B, and apoptosis was determined with annexin-V/PI staining followed by FACS analysis. Percentages of annexin-V/PI positive cells are shown. Average and error bars represent mean±SD from three independent experiments. (D) Cells were treated as in B, and DEVDase activity was measured as described in materials and methods. Average and error bars represent mean±SD from four independent experiments performed in duplicates. (E) The control (Neo) and Hsp72 expressing (Hsp72) PC12 cells were treated with (0.25 μM) Tg for the indicated time and western blotting of total protein was performed using antibodies against caspase-3 and β-actin. * indicates a statistical significance between Neo and Hsp72 cells; p<0.05. ** indicates a statistical significance between Neo and Hsp72 cells; p<0.005.

[0216] FIG. 2. Hsp72 prevents ER stress-induced loss of mitochondrial membrane potential and cytochrome c release. (A) The control (Neo) and Hsp72 expressing (Hsp72) PC12 cells were either untreated (Control) or treated with (0.25 μM) Tg for the indicated time and mitochondrial membrane potential was assessed by TRME staining and flow cytometry. A representative image of three independent experiments is shown. (B) The control (Neo) and Hsp72 expressing (Hsp72) PC12 cells were treated (0.25 μM) Tg for indicated time points. Following treatment cells were incubated with TMRE (100 nM). Mitochondrial membrane potential was monitored by measuring the fluorescence intensity at 582 nm (FL2). Average and error bars represent mean±SD from three independent experiments. (C) The control (Neo) and Hsp72 expressing (Hsp72) PC12 cells were treated with (0.25 μM) Tg for the indicated time. Cytosolic extracts were prepared as described in materials and methods and resolved by SDS-PAGE followed by western blotting using antibodies against Cytochrome c and β-actin.

[0217] FIG. 3. ER stress-induced activation of IRE1/XBP1 axis is increased in Hsp72 expressing cells. (A) The control (Neo) and Hsp72 expressing (Hsp72) PC12 cells were either untreated (C) or treated with (0.1 μM) Tg for indicated time points. RT-PCR analysis of total RNA was performed to simultaneously detect both spliced and unspliced XBP1 mRNA and GAPDH. Size of PCR products: unspliced XBP1=289 bp, spliced XBP1=263 bp. The image is presented inverted for greater clarity. (B) In the experiment described in A, XBP-1 mRNA splicing was calculated after densitometric analysis of the XBP-1s PCR products. Average and error bars represent mean±SD from three independent experiments. (C) The control (Neo) and Hsp72 expressing (Hsp72) PC12 cells were treated with (0.25 μM) Tg for the indicated time. Immunoblotting of total protein was performed using antibodies against spliced XBP1 and β-actin. (D) The control (Neo) and Hsp72 expressing (Hsp72) PC12 cells were either untreated (Control) or treated with (0.25 μM) Tg for the indicated time. Immunoblotting of total protein was performed using antibodies against phospho-JNK and β-actin. (E) The control (Neo) and Hsp72 expressing (Hsp72) PC12 cells were treated with (0.25 μM) Tg for the indicated time. Immunoblotting of total protein was performed using antibodies against CHOP, phospho-eIF-2α, total eIF-2α and β-actin. (F) Cells were treated as in A, and the expression a level of indicated genes was quantified by real-time RT-PCR, normalizing against GAPDH. Average and error bars represent mean 1 SD from two independent experiments performed in triplicates. * indicates a statistical significance between Neo and Hsp72 cells; p<0.05. ** indicates a statistical significance between Neo and Hsp72 cells; p<0.005.

[0218] FIG. 4. Increased production of spliced XBP1 contributes to cytoprotective function of Hsp72 against ER stress-induced apoptosis. (A) Schematic presentation of wild-type and mutant IRE1α plasmids. (B) PC12 cells were transfected with indicated IRE1α plasmids. 24 h post transfection either untreated (Un) or treated with (0.25 μM) Tg for the 6 h. RT-PCR analysis of total RNA was performed to simultaneously detect both spliced and unspliced XBP1 mRNA and GAPDH. The image is presented inverted for greater clarity. (C) pCMV.SPORT-βGAL was co-transfected with either pcDNA3.1 or IRE1α ΔRNase expression plasmid in control (Neo) or HSP72 expressing (HSP72) PC12 cells. 24 h post transfection cells were either left untreated (UT) or treated with (0.25 μM) Tg for 48 h, (2 μg/ml) Tm for 48 h, (150 nM) staurosporine (STS) for 16 h or (25 μg/ml) etoposide (ETO) for 24 h. The reduction in cell viability was determined by measuring the reduction in β-galactosidase activity after the drug treatments. Average and error bars represent mean±SD from three independent experiments performed in triplicates. ** indicates a statistical significance between Hsp72 and Hsp72 plus IRE ΔRNase cells; p<0.005. (D) Hsp72 expressing PC12 cells were transduced with lentivirus expressing indicated XBP1 targeting shRNA. RT-PCR analysis of total RNA was performed to simultaneously detect unspliced XBP1 mRNA and GAPDH. The image is presented inverted for greater clarity. (E) The control (Neo), Hsp72 expressing (HSP72) and Hsp72 cells expressing indicated shRNAs were either left untreated (UT) or treated with (0.25 μM) Tg, (2 μg/ml) Tm, (150 nM) staurosporine (STS) or (25 μg/ml) etoposide (ETO). The reduction in cell viability was determined by MTT assay. Average and error bars represent mean±SD from three independent experiments performed in triplicates. ** indicates a statistical significance between Hsp72 and Hsp72 plus XBP1 shRNA cells; p<0.005.

[0219] FIG. 5. Hsp72 forms a protein complex with IRE1α, and ATPase domain of HSP72 is critical for IRE1α binding. (A) Schematic diagram for IRE1α structure domains and expression constructs. (B) Schematic diagram for Hsp72 structure domains and expression constructs. (C) Hsp72 expressing PC12 cells (Hsp2) were transfected with empty vector (EV) or expression vectors for IRE1α FL-HA or IRE1α ΔC-HA. After 24 h, cells were either left untreated (UT) or treated with (0.25 μM) Tg for 12 h and then the co-precipitation of Hsp72 with IRE1α FL-HA or IRE1α ΔC-HA was evaluated by IP and western blot. (D) PC12 cells expressing the indicated Hsp72 constructs were transfected with IRE1α FL-HA. Lysate from untransfected PC12 cells (UT) was used as a negative control. Co-precipitation of wild-type, ΔATPase and ΔEEVD mutant of Hsp72 with IRE1α FL-HA was evaluated by IP and western blot. (E) HEK 293 cells were transiently transfected with IRE1α FL-HA expression vector or empty vector (EV). After 48 hr, IRE1α FL-HA was immunoprecipitated and its association with endogenous Hsp72 was assessed by western blot. (F) Endogenous Hsp72 was immunoprecipitated from HEK 293 cells transiently transfected with IRE1α FL-HA expression vector or empty vector (EV), and its association with IRE1α was determined by western blot analysis. Input: 5% of the total cell lysate used for IPs.

[0220] FIG. 6. The ATPase domain of Hsp72 is necessary for activation of IRE1/XBP1 axis and inhibition of ER stress-induced apoptosis. (A) The control (Neo), wild type HSP72 and ΔATPase Hsp72 expressing PC12 cells were either untreated or treated with (0.25 μM) Tg for 12 h and the expression levels of indicated genes was quantified by real-time RT-PCR, normalizing against GAPDH. Average and error bars represent mean±SD from two independent experiments performed in triplicates. ** indicates a statistical significance between Hsp72 WT and Hsp72 ΔATPase cells; p<0.005. (B) The control (Neo), wild type Hsp72 and ΔATPase Hsp72 expressing PC12 cells were treated (0.25 μM) Tg or (2 μg/ml) Tm for 48 h, and cell viability was determined using MTT assay. Average and error bars represent mean±SD from three independent experiments performed in triplicates. ** indicates a statistical significance between Hsp72 WT and Hsp72 ΔATPase cells; p<0.005. (C) The control (Neo), wild type Hsp72 and ΔATPase Hsp72 expressing PC12 cells were treated as in B, and DEVDase activity was measured as described in materials and methods. Average and error bars represent mean±SD from four independent experiments performed in duplicates. ** indicates a statistical significance between Hsp72 WT and Hsp72 ΔATPase cells; p<0.005.

[0221] FIG. 7. Regulation of IRE1α-XBP1 by HSP72 contributes to thermotolerance against ER stress and increased secretion of neurotrophins. (A) PC12 cells were transduced with lentivirus expressing control non-targeting shRNA or XBP1 targeting shRNA. RT-PCR analysis of total RNA was performed to simultaneously detect unspliced XBP1 mRNA and GAPDH. The image is presented inverted for greater clarity. (B) The control (PGIPZ) or XBP1 shRNA expressing (XBP1 shRNA) PC12 cells were heat shocked for 1 h at 42° C. and let to recover for 6 h. Western blot on whole cell lysates were carried out to check the expression of Hsp72 after heat shock with β-actin as loading control (C) Untreated (PGIPZ C, XBP1shRNA C) and heat preconditioned (PGIPZ HS, XBP shRNA HS) control (PGIPZ) and XBP1 shRNA expressing (XBP1 shRNA) PC12 cells were treated with (0.25 μM) Tg for 48 h, (2 μg/ml) Tm for 48 h, (150 nM) staurosporine (STS) for 16 h or (25 μg/ml) etoposide (ETO) for 24 h. The reduction in cell viability was determined by MTT assay. Average and error bars represent mean±SD from three independent experiments performed in triplicates. (D-E) The control (Neo) and Hsp72 expressing (Hsp72) PC12 cells were treated with (0.1 μM) Tg, (0.5 μg/ml) Tm or (50 μM) 6-OHDA for 24 h. Culture supernatant was analysed for NGF and BDNF according to the conditions as described in methods section. Average and error bars represent mean±SD from three independent experiments performed in triplicates.

[0222] FIG. 8. Sub-cellular localisation of IRE1 is not affected by Hsp72. Hsp72 and Neo expressing cells were transfected with IRE-GFP. After 24 h of treatment Tg cells were fixed in 3.7% formaldehyde and the coverslips were mounted using Vectashield mounting medium with DAPI (H-1200). Cells were visualised using a Nikon microscope fitted with appropriate filters.

[0223] FIG. 9. Overexpression of Hsp72 does not have an effect on the half-life of IRE1. (A) Control (Neo) and Hsp70 expressing (Hsp72) PC12 cells were treated with 10 ng/ml Tg for the indicated time. Immunoblotting of total protein was performed using antibodies against IRE1α and β-actin. (B) In the experiment described in A, band density of IRE1α was calculated by densitometric normalised against β-actin. Average and error bars represent mean±SD from two independent experiments.

[0224] FIG. 10. Overexpression of Hsp72 protects PC12 cells from 6-OHDA treatment induced cell death. The control (Neo) and Hsp70 expressing (Hsp72) PC12 cells were treated with 200 mM 6-OHDA for 24 h. Reduction in cell viability was analysed by sub G1 peak. Average and error bars represent mean±SD from three independent experiments performed in triplicate.

[0225] FIG. 11. The UPR. A diagrammatic representation of the UPR and its relationship to the apoptotic pathway. The point at which Hsp72 interacts with IRE1α is indicated, and it can be seen that this interaction affects the splicing of XBP1 and increases the levels of XBP1s mRNA and also increases the levels of JNK activity.

[0226] FIG. 12. Effect of Hsp72 co-factor Hsp40. Hsp72 expressing PC12 cells (Hsp2) were transfected with empty vector (EV) or expression vectors for IRE1α FL-HA or IRE1α DC-HA. After 24 h, cells were either left untreated (C) or treated with (0.25 mM) Tg for 12 h and then the co-precipitation of Hsp72 with IRE1α FL-HA or IRE1α DC-HA was evaluated by IP and western blot. Input: 5% of the total cell lysate used for IPs.

[0227] FIG. 13. HSP72 regulates secretary capacity of UPR primed CHO cells. GFP and Hsp72 expressing CHO cells along with cells induced with thermotolerance were treated with 10 nM Tg for 24 h. Culture supernatant was analysed for PSA by ELISA. The average values of 3 independent experiments were plotted on the graph with the concentration on the Y-axis and treatments on the X-axis.

[0228] FIG. 14. Activity and regulation of IRE1α during ER stress. The chaperone GRP78 is bound to the luminal domain of IRE1 during resting conditions. Upon conditions of ER stress, GRP78 dissociates from IRE1 and binds unfolded proteins leading to oligomerisation, trans-autophosphorylation and activation of IRE1. Activated ribonuclease domain of IRE1 splices the mRNA of XBP1 leading to translation of the active transcription factor XBP1s. XBP1s stimulates the transcription of genes involved in re-establishing ER homeostasis and promoting cell survival. The endoribonuclease activity of IRE1 is regulated by BI-1, Bax, Bak and HSP70 that bind to the cytosolic domain of IRE1. IRE1 also splices some other mRNAs leading to their destruction in a mechanism termed regulated IRE1-dependent mRNA decay (RIDD). Upon activation, IRE1 also recruits TRAF2 leading to the down-stream activation of MAP kinases and of transcription factor NFκB, which is thought to promote pro-apoptotic signalling and ER stress-induced cell death.

[0229] Various aspects and embodiments of the present invention will now be described in more detail by way of example. It will be appreciated that modification of detail may be made without departing from the scope of the invention.

### EXAMPLES

### Example 1

### Hsp72 Expression Inhibits ER Stress-Induced Apoptosis Upstream of Mitochondria

### Cell Transfection & Culture

[0230] The neuroprotective effects of Hsp72 overexpression have been reported in numerous studies during ischemia-like conditions in neuronal cells [15,31,32]. To assess the effect of Hsp72 expression on ER stress-induced apoptosis stable clones of PC12 cells expressing the inducible form of Hsp70 (Hsp72) were generated.

[0231] Rat pheochromocytoma PC 12 cells (obtained from ECACC) were cultured in Dulbecco's modified Eagle's medium (DMEM) from Sigma (D6429) supplemented with 10% heat inactivated horse serum, 5% foetal bovine serum and 1% penicillin/streptomycin (Sigma) at 37° C., 5% CO₂ in a humidified incubator. Appropriate number of cells was seeded 24 h prior to treatment.

[0232] The plasmid expressing wild type HSP72 was a kind gift from Dr. Tomomi Gotoh, Kumamoto University, Japan [10]. Transfection of cells was carried out using Lipofectamine 2000 (Invitrogen) according to the manufacturer's protocol. Stock solutions of 6-Hydroxydopamine were made freshly in sodium metabisulfite (1 M) prior to experiment. PC12 cells were treated with 200 μM 6-OHDA for 24 h before analysis. All reagents were from Sigma-Aldrich unless otherwise stated.

### Hsp72 Expression

[0233] The level of Hsp72 expression in transfected cells was measured by Western blotting. This was performed by washing cells once in ice-cold PBS and lysing cells in whole cell lysis buffer (20 mM HEPES pH 7.5, 350 mM NaCl, 0.5 mM EDTA, 1 mM MgCl₂, 0.1 mM EGTA and 1% NP-40) after the stipulated treatment time and boiling at 95° C. with Laemmli's SDS-PAGE sample buffer for 5 min. Protein concentration was determined by the Bradford method. Equal volumes of sample lysates were run on an SDS polyacrylamide gel. The proteins were transferred onto nitrocellulose membrane and blocked with 5% milk in PBS-0.05% Tween. The membrane was incubated with the primary antibody HSP72 (Stressgen SPA-810) for 2 h at room temperature or overnight at 4° C. The membrane was washed 3 times with PBS-0.05% Tween and further incubated in appropriate horseradish peroxidase-conjugated secondary antibody (Pierce) for 90 min. Signals were detected using West pico chemiluminescent substrate (Pierce).

[0234] For induction of thermotolerence cells were subjected to 1 h of heat shock at 42° C.±0.5° C. and processed after a 6 h recovery at 37° C. The level of Hsp72 expression in PC12 cells were within the normal physiological range, because ectopic Hsp72 expression is comparable to the level of Hsp72 induced during thermotolerance in PC12 cells (FIG. 1A).

### Cell Viability

[0235] To determine the effect of Hsp72 expression on ER stress-induced apoptosis, control (Neo) and Hsp72-expressing (Hsp72) PC12 cells were treated with either 0.25 μM thapsigargin or 1 μg/ml tunicamycin for 48 h.

[0236] Cell viability was determined by the MTT assay. After 48 hrs of treatment, 1 mg/ml concentration of MTT ((3-(4,5-dimethylthiazol-2-yl)-2,5-diphenyl tetrazonium bromide) was added to the wells and incubated at 37° C. for 3 hrs. The reaction was stopped with a stop mix containing 20% SDS in 40% dimethyl formamide. The colour intensity was measured at 550 nm and percentage cell viability was calculated using the untreated samples as 100%. It was observed that Hsp72 expression partially protected PC12 cells from ER stress-induced cell death (FIGS. 1B & C).

### Caspase Activation

[0237] ER stress-induced caspase activity was measured by analysing DEVDase activity as follows. Cells were harvested and pelleted by centrifugation at 350 g. After washing in PBS, cell pellets were re-suspended in 50 μl of PBS and 25 μl was transferred to duplicate wells of a microtiter plate and snap-frozen in liquid nitrogen. To initiate the reaction, 50 μM of the caspase substrate carbobenzoxy-Asp-Glu-Val-Asp-7-amino-4-methyl-coumarin (DEVD-AMC, Peptide Institute Inc.) in assay buffer (100 mM HEPES, pH 7.5, 10% sucrose, 0.1% CHAPS, 5 mM DTT and 0.0001% Igepal-630, pH 7.25) was added to cell lysates. Liberated free AMC was measured by a Wallac Victor 1420 Multilabel counter (Perkin Elmer Life Sciences) using 355 nm excitation and 460 nm emission wavelengths at 37° C. at 60 sec intervals for 25 cycles. The data was analyzed by linear regression and enzyme activity was expressed as nM of AMC released×min⁻¹×mg⁻¹ total cellular protein.

[0238] ER stress-induced caspase activity was found to be significantly reduced in Hsp72 expressing cells as compared with control cells (FIG. 1D). In agreement with reduced caspase activity, Hsp72 expressing cells showed reduced processing of pro-caspase-3 to active caspase-3 (FIG. 1E). The availability of processed caspase-3 was measured using a Western blot assay, as described above using ht eprimary antibody Caspase-3 (Cell Signalling, Cat˜9662). These results suggest that caspase activity is required for ER stress-induced apoptosis and that Hsp72 can inhibit the ability of the cell to activate the caspase cascade.

### Loss of Mitochondrial Membrane Potential (ΔΨm)

[0239] The loss of mitochondrial membrane potential (ΔΨm) and mitochondrial outer membrane permeabilization (MOMP) is a hallmark of apoptosis [38,39]. Previous studies have shown that Hsp72 inhibits apoptosis by preventing mitochondrial outer membrane permeabilization and cytochrome c release [10,11].

[0240] The effect of Hsp72 on the dissipation of ΔΨm and release of cytochrome c to the cytosol upon exposure to ER stress stimuli was evaluated. To quantify ΔΨm, probe tetramethylrhodamine ethyl ester (TMRE, Molecular Probes) [66], a potentiometric fluorescent dye that incorporates into mitochondria in a ΔΨm-dependent manner, was used. Cells were trypsinized and then were either left untreated or treated with 0.25 μM thapsigargin. The cells were then incubated with TMRE for 30 min in the dark and analyzed by flow cytometry using a FACSCalibur instrument. A drop in ΔΨm was observed in Neo cells following thapsigargin treatment (FIG. 2A). The expression of Hsp72 inhibited the loss of ΔΨm (FIG. 2A). At 48 h, loss of ΔΨm was detected in 80-90% of Neo cells treated with thapsigargin or tunicamycin, respectively (FIG. 2B). However, at the same time point, thapsigargin or tunicamycin only induced loss of ΔΨm in 50% of the Hsp72 expressing cells (FIG. 2B).

[0241] To further study the involvement of mitochondria in ER stress-induced cell death, the release of cytochrome c into the cytosol was assessed. The cells were washed in ice-cold PBS and lysed using cell lysis and mitochondrial intact buffer (CLAMI) containing 250 mM sucrose, 70 mM KCl dissolved in 1×PBS with 0.5 mM DTT and 2.5 μg/ml Pepstatin and 0.2 g/ml Digitonin. The cells were allowed to swell on ice for 5 min. The cell suspension was centrifuged at 400 g for 5 min and the pellet was removed. The supernatant was transferred to a clean eppendorf tube and the mitochondrial and microsomal fractions were separated by spinning at 20,000 g for 5 min. The cytosolic fraction was removed and prepared for western blot by adding 5× sample buffer.

[0242] Western blot analysis of the cytosolic extracts of cells was performed as discussed above using the primary antibody Cytochrome C (BD Pharmingen, Cat˜556433). This analysis showed that exposure of Neo cells to thapsigargin for 24 h triggered release of cytochrome c from mitochondria to the cytoplasm (FIG. 2C). However, at the same time point, the release of cytochrome c induced by thapsigargin was significantly reduced in Hsp72 expressing cells (FIG. 2C). These results suggest that Hsp72 may be acting upstream of MOMP to inhibit ER stress-induced apoptosis.

### Example 2

### Hsp72 Expression Enhances XBP1 mRNA Splicing Under ER Stress Conditions

[0243] Activation of the UPR and regulation of protein quality control is essential to restore cellular homeostasis and prevent ER stress-induced apoptosis [18,19]. To investigate the possible regulation of the UPR by Hsp72, the activation of IRE1α/XBP1 and PERK/CHOP axis in control and Hsp72 expressing cells was determined.

XBP1 mRNA Splicing

[0244] First the levels of XBP1 mRNA splicing were determined by semi-quantitative RT-PCR. Total RNA was isolated using RNeasy kit (Qiagen) according to the manufacturer's instructions. Reverse transcription (RT) was carried out with 2 μg RNA and Oligo dT (Invitrogen) using 20 U Superscript II Reverse Transcriptase (Invitrogen). The cDNA product was subjected to 25-35 cycles of PCR using the forward primer 5-TTACGAGAGAAAACTCATGGGC-3 and reverse primer 5-GGGTCCAACTTGTCCAGAATGC-3 specific for Rat XBP-1. GAPDH (forward: ACCACAGTCCATGCCATC; reverse: TCCACCACCTGTTGCTG) was used as an endogenous control. For real-time PCR experiments, cDNA products were mixed with 2× TaqMan master mixes and 20× TaqMan Gene Expression Assays (Applied Biosystems) and subjected to 40 cycles of PCR in StepOnePlus instrument (Applied Biosystems). Relative expression was evaluated with ΔΔC_{T} method.

[0245] Next, production of spliced XBP1 protein was determined by Western blotting as discussed above using the primary antibody XBP1 (Santa Cruz Biotechnology, Inc, Cat# sc-7160). Notably, upon treatment with thapsigargin Hsp72 cells displayed increased levels of the spliced XBP1 mRNA as compared to Neo cells, observing a sustained signalling over time and late inactivation (FIG. 3A). In agreement with the increased XBP1 mRNA splicing observed above, enhanced expression of XBP1s protein was observed in Hsp72 cells undergoing ER stress when compared with Neo cells (FIG. 3B).

### JNK Activation

[0246] Since JNK activation is also induced downstream of IRE1α activation, the effect of Hsp72 on JNK activation during ER stress signalling was determined. Activation of JNK was detected by western blotting as discussed above using the primary antibody JNK (Cell Signalling Cat#92555). ER stress-induced JNK activation was reduced in Hsp72 cells as compared to Neo cells (FIG. 3C).

### Activation of the PERK/CHOP Axis

[0247] Activation of the PERK/CHOP axis, a parallel pathway activated by ER stress, was also examined by measuring phosphorylation of eIF-2α, a direct target of PERK, and expression of CHOP. The levels of phosphorylated eIF-2α, and the levels of CHOP were determined by Western blotting as described above, using the primary antibody phosphorylated eIF-2α (Cell Signalling Cat#3597) and the primary antibody CHOP (Santa Cruz Biotechnology, Inc, Cat# sc-973), respectively. The induction of ER stress-induced phosphorylation of eIF-2α and induction of CHOP was not significantly different in Hsp72 cells as compared to Neo cells, although Hsp72 cells showed slightly earlier kinetics in eIF-2α phosphorylation (FIG. 3D). These results indicate that in conditions of ER stress, cellular adaptation is mediated by the transcriptional modulation of the expression of a cohort of UPR target genes. The IRE1α/XBP1 arm of the UPR specifically mediates the induction of specific target genes such as EDEM1, ERdj4, and P58^{1PK}([21,40]. Analysis of gene expression profiles by quantitative RT-PCR, performed as discussed above, revealed that induction of EDEM1, ERdj4, HERP, P58^{1PK} and Grp78 was significantly enhanced in Hsp72 cells as compared to Neo cells (FIG. 3E). Taken together, these observations suggest that Hsp72 specifically regulates ER stress signalling through the modulation of the IRE1α/XBP1 axis of the UPR.

### Example 3

### Increased XBP1s Protein is Required for Enhanced Cell Survival Induced by Hsp72 Under ER Stress Conditions

[0248] Recently it has been shown that experimental prolonging of IRE1α signalling independent of ER stress can promote cell adaptation to protein folding stress and survival [9,41]. Here it has been shown that the ability of Hsp72 to inhibit ER stress-induced apoptosis correlates with enhanced production of XBP1s.

### Preparation of a Dominant Negative IRE1α Mutant

[0249] To determine the role of XBP1s in the cytoprotective effects of Hsp72 a dominant negative mutant of IRE1α was used to compromise the production of XBP1s and evaluate its effect on the protection mediated by Hsp72.

[0250] Stable sub-clones of PC12-Hsp72 with reduced levels of XBP1 were generated by targeting XBP1 mRNA with shRNA using the lentiviral expression vector psiHIV-U6 (GeneCopoeia). The plasmids containing shRNAs targeting rat XBP-1 were obtained from GeneCopoeia, Rockville, USA (RSH045024-HIV U6). Transfection and cell culture were carried out as descried above. The targeting sequences identified for rat XBP1 were XBP1 shRNA1: 5-actgcgcgagatagaaaga-3; XBP1 shRNA2: 5-gttgcctatcagattctg-3; XBP1 shRNA3: 5-gagagccaaactaatgtgg-3 and XBP1 shRNA4: 5-ctgaggtcttcaaaggtat-3.

XBP1 mRNA Splicing

[0251] Expression vectors for various mutants of IRE1α (IRE1α KA, IRE1α ΔC and IRE1α ΔRNase) (FIG. 4A) were transfected into PC 12 cells, and the levels of XBP1 mRNA splicing were examined upon ER stress. The plasmids expressing IRE1α KA, IRE1α ΔC and IRE1α ΔRNase were kind gifts from Dr Kazunori Imaizumi, University of Miyazaki, Japan [64]. Transfection and cell culture were carried out as descried above.

[0252] The three mutants of IRE1α reduced ER stress-induced splicing of XBP1 as compared to control pcDNA transfected cells (FIG. 4B). Further experiments were performed with the IRE1α ΔRNase because IRE1α KA or IRE1α ΔC mutants may alter the downstream events mediated by the kinase domain of IRE1α in addition to abrogating its endoribonuclease activity. The IRE1α ΔRNase mutant was co-transfected with β-galactosidase plasmid into Neo and Hsp72 cells. Transfection and cell culture were carried out as descried above. After co-transfection of a reporter gene (β-galactosidase), reduction in reporter enzyme activity has been used to determine whether a gene has a detrimental effect on cell survival [42]. The effect of IRE1α ΔRNase on cell viability was determined by measuring β-galactosidase activity after treatment with thapsigargin, tunicamycin, staurosporine and etoposide [42]. Etoposide and staurosporine were used show that expression of IRE1α ΔRNase does not sensitize the cells to other apoptosis inducing agents. The IRE1α ΔRNase mutant specifically attenuated the protective effect of Hsp72 on ER stress-induced apoptosis (FIG. 4C). As control, the non-ER stress agents such as etoposide and staurosporine were used, observing no effects on cells survival after the expression of IRE1α ΔRNase construct.

[0253] To further confirm the role of increased XBP1s protein in the cytoprotective effects of Hsp72, XBP1s levels were knocked down by introducing XBP1 targeted shRNAs into Hsp72 cells, as described above, and assessing their effects on cell survival. It was found that all four shRNAs were able to silence XBP1s expression to varying degrees (FIG. 4D). Notably, the protective effect of HSP72 during ER stress-induced apoptosis was abrogated in four independent sub-clones of HSP72 cells expressing XBP1 targeted shRNAs (FIG. 4E). These results suggest that all four XBP1 targeting shRNAs are able to nullify the effect HSP72 overexpression on ER stress-induced production of XBP1s.

[0254] The knockdown of XBP1 did not alter the cytoprotective effects of HSP72 on staurosporine- or etoposide-induced apoptosis (FIG. 4E). Collectively, these results suggest that Hsp72 enhances survival under ER stress conditions by upregulation the adaptive responses initiated by the of IRE1α/XBP1 branch of the UPR.

### Example 4

### Hsp72 Forms a Protein Complex with IRE1α

[0255] To determine the mechanism by which Hsp72 regulates IRE1α activity, the physical interaction between Hsp72 and IRE1α was investigated. For this purpose Hsp72 expressing PC12 were transfected with wild-type IRE1α FL-HA or IRE1α ΔC-HA (FIG. 5A). Expression plasmids for wild type IRE1α-HA or IRE1α ΔC-HA were as reported previously [28].

### Interaction Between Hsp72 and IRE1α

[0256] Interaction of Hsp72-IRE1α was determined by co-immunoprecipitation assays. Immunoprecipitation of HA-tagged wild-type IRE1α or IRE1α ΔC were performed using Pierce Profound mammalian HA tagged IP/Co-IP kit (23615). Briefly, cell lysates were incubated with HA-agarose slurry in IP column overnight. Agarose beads were washed twice with TBS containing 0.05% Tween. Protein complexes were extracted by boiling the beads with 2× lane marker buffer and analysed by western blotting as described above using the primary antibody IRE1α (Cell Signalling Cat#3294S). For Immunoprecipitation of Hsp72, cleared protein extracts were incubated with anti-HSP72 polyclonal antibody (Stressgen SPA-811) overnight at 4° C., followed by 100 μl of a 12% suspension of protein A-Sepharose for 1 h at 4° C. and then washed three times with TBS-0.05% Tween. Protein complexes were eluted by boiling in 2× lane marker buffer and analysed by western blotting as described above using the primary antibody Hsp72 (Stressgen SPA-810).

[0257] The Hsp72-IRE1α complex was detected in the absence of ER stress and required the cytosolic C-terminal region of IRE1α, which encodes the kinase and endoribonuclease domains (FIG. 5C). Further, the interaction of Hsp72 with IRE1α was not altered in cells undergoing ER stress triggered by thapsigargin treatment (FIG. 5C). Under similar conditions Hsc70, the constitutive form of Hsp72 did not interact with the cytoplasmic C-terminal region of IRE1α (FIG. 5C).

### Determination of Interacting Domains

[0258] Hsp72 consists of three structural motifs: an N-terminal ATPase domain, a C-terminal substrate binding domain and a C-terminal sequence EEVD. Hsp72 function requires coordinated action of all three domains. To map the critical domain of Hsp72 required for IRE1α binding, wild-type IRE1α FL-HA was transfected into PC 12 cells expressing wild-type Hsp72, ΔATPase-Hsp72 or A EEVD-Hsp72 (FIG. 5B). Plasmids expressing wild type HSP72, ΔATPase-HSP72 or A EEVD-HSP72 were kind gifts from Dr. Tomomi Gotoh, Kumamoto University, Japan [10]. The association of IRE1α with HSP72 was determined by co-immunoprecipitation assays, as described above.

[0259] Wild-type Hsp72 and ΔEEVD-Hsp72 associated with IRE1α. However, ΔATPase-Hsp72 failed to interact with IRE1α, demonstrating that the ATPase domain of Hsp72 is necessary for interaction of Hsp72 with IRE1α (FIG. 5D). Further the interaction between ectopically expressed wild-type IRE1α FL-HA and endogenous Hsp72 in HEK 293 cells was determined (FIG. 5E).

[0260] Endogenous Hsp72 was immunoprecipitated from HEK 293 cells transfected with wild-type IRE1α FL-HA or empty vector as described above. A physical interaction between endogenous Hsp72 and ectopic as well as endogenous IRE1α was observed (FIG. 5F).

### Endoribonuclease Activity

[0261] Based on the results of the immunoprecipitation experiments, the possible effects of Hsp72 on the endoribonuclease activity of IRE1α in vitro were monitored. The activity of recombinant human IRE1αN-HIS was produced as a GST fusion protein and purified using the Prescission Protease cleaved system. IRE1α ΔN was incubated with recombinant HSP70 (Stressgene) in a total volume of 50 μl for 1 hr at 30° C. with 10 μg of total mRNA as substrate (obtained from mouse brain cortex because of minimal basal XBP-1 mRNA splicing levels) in a buffer containing 20 mM HEPES (pH 7.3), 1 mM DTT, 10 mM magnesium acetate, 50 mM potassium acetate, and 2 mM ATP. mRNA was re-extracted with 500 ml of Trizol, and the endoribonuclease activity of IRE1α was monitored by RT-PCR using the XBP-1 mRNA splicing assay that employs a set of primers that closely surround the processing site. Using this method, a decrease in the amount of non-spliced XBP-1 mRNA was observed due to its cleavage by IRE1αN-HIS as previously described [28].

### IRE1α Signalling

[0262] The critical role of the Hsp72 ATPase domain in IRE1α binding led to the determination of its role in ER stress-mediated IRE1α signaling. The induction of EDEM1, ERdj4, HERP, P58^{1PK} and Grp78 in PC12 cells expressing wild-type Hsp72 or ΔATPase-Hsp72 was determined by quantitative RT-PCR analysis, performed as described above. This revealed that induction of EDEM1, ERdj4, HERP, P58^{1PK} (and Grp78 was significantly enhanced only in wild-type HSP72 expressing cells. Notably, induction of EDEM1, ERdj4, HERP, P58^{1PK} and Grp78 in ΔATPase-Hsp72 expressing cells was comparable to Neo cells (FIG. 6A).

### ER Stress Induced Apoptosis Activation

[0263] The ER stress-induced apoptosis and caspase activity in PC12 cells expressing wild-type Hsp72 or ΔATPase-Hsp72 was analysed. As shown on FIGS. 6 B & C, wild-type Hsp72 expressing cells were more resistant to ER stress-induced apoptosis and caspase activation. There was no significant difference in ER stress-induced apoptosis and caspase activation in ΔATPase-Hsp72 and Neo cells (FIGS. 6 B & C). Collectively, these results show that the ability of Hsp72 to bind to IRE1α correlates with increased induction of UPR target genes downstream of IRE1α/XBP1 and protection against ER stress-induced cell death.

### Example 5

### Hsp72 Regulates IRE1α-XBP1 in Physiological Models

[0264] Mammalian cells, when exposed to a non-lethal heat shock, have the ability to acquire a transient resistance to subsequent exposures at elevated temperatures, a phenomenon termed thermotolerance. It has previously been shown that mild heat shock preconditioning can induce expression of Hsp72 and protect PC 12 cells against a number of cytotoxic agents [43].

### Acquisition of Thermotolerance

[0265] To evaluate the effect of Hsp72 on the IRE1α-XBP1 axis in physiological conditions the acquisition of thermotolerance in control and XBP1 knockdown PC12 cells was determined. For this purpose parental PC12 cells were transduced with control (PGIPZ) and XBP1 targeting shRNA (XBP1 shRNA) expressing lentiviral particles. The plasmids containing shRNAs targeting rat XBP-1 were obtained from GeneCopoeia, Rockville, USA (RSH045024-HIV U6) and transfection was performed as described above.

[0266] Mild heat shock preconditioning, as described above, induced the expression of Hsp72 in control and XBP1 knockdown PC12 cells to comparable levels (FIGS. 7A & B).

[0267] Knockdown of XBP1 specifically abrogated the acquisition of thermotolerance against ER stress-induced apoptosis in PC12 cells (FIG. 7C). The knock down of XBP1 had no effect on acquisition of thermotolerance against etoposide or staurosporine (FIG. 7C). These results suggest an important role for regulation of IRE1α/XBP1 axis by Hsp72 in attainment of thermotolerance induced upon heat preconditioning. More importantly, these data provides a molecular crosstalk between the cytosolic Heat shock response and the UPR.

### Secretion of NGF and BDNF

[0268] The main physiological function of the XBP-1 axis of the UPR is to modulate secretory pathway function, enhancing protein secretion [44,45,46]. PC12 is a cell line derived from a pheochromocytoma of the rat adrenal gland and secretes neurotrophins such as nerve growth factor (NGF) and brain-derived neurotrophic factor (BDNF). Therefore, we monitored the secretion of NGF and BDNF in control (Neo) and Hsp72 (Hsp72) expressing cells after exposure to sublethal dose of either thapsigargin (Tg) or tunicamycin (Tm) to modulate ER physiology. Cells were treated with 0.1 μM Tg or 0.5 Tm or 50 μM 6-OHDA for 24 h to induce UPR. Culture media was analysed for NGF or BDNF release using β-NGF (DY 256) or BDNF (DY 248) DuoSet ELISA development kit according to manufacturer's protocol (R&D Systems). The amount of NGF or BDNF released in to the media was calculated using the standard curve generated in parallel with recombinant NGF and BDNF.

[0269] In addition, the hydroxylated analogue of dopamine, 6-hydroxy dopamine (6-OHDA) was employed, a commonly used model to mimic Parkinson's disease that also triggers ER stress [47,48]. First the effect of Hsp72 expression on 6-OHDA induced death in PC12 cells was determined. It was found that Hsp72 expressing cells were resistant to 6-OHDA induced death as compared to control (Neo) cells (data not shown). The increased secretion of NGF and BDNF into the cell-culture media of Hsp72 expressing cells after treatment with Tg, Tm and 6-OHDA was observed (FIG. 7D-E). These data indicate that Hsp72 regulates secretion of neurotrophins (NGF and BDNF) by PC 12 cells likely mediated by the modulation of IRE1α/XBP1 function.

[0270] All the experiments described were repeated at least twice. Results are expressed as mean±standard deviation. Statistical analyses of the results were done with Student's t test using Graphpad (http://www.graphpad.com).

### Example 6

### Hsp72 Increases PSA Secretion in Hsp72-Transfected CHO Cells

[0271] In order to analyse the secretary capacity of CHO-PSA cells after UPR-priming, cells transiently transfected with GFP, cells transiently transfected with Hsp72 and heat shocked cells were treated with 10 nM Tg. All transfections were performed using adenoviral vectors. The cells were incubated at 42° C. for 1 h in the presence of 10 nM Tg and allowed to recover for 6 h at 37° C. before measurements were taken.

[0272] To quantify the release of Prostrate-specific antigen (PSA) from CHO cells over-expressing PSA, ELISA was performed. Cells were cultured in DMEM-F12 without supplements and were treated with 10 nM Tg for 24 h. The culture media was used for ELISA carried out using PSA ELISA kit from Abnova (Cat # KA 0208). 50 μl culture media were dispensed to the wells along with 50 μl of zero buffer. Standards of 0, 2, 4, 15, 60 and 120 ng/ml PSA were also dispensed to individual wells. The mixture was incubated in the well for 60 min. After the incubation, media were removed from well and was washed with deionised water 5 times. 100 μA of enzyme conjugate reagent was dispensed to each well and were incubated in RT for a further 60 min. The incubation mixture was removed and the wells were rinsed 5 times. 100 ml of TMB reagent was added to each well and was incubated for 20 min at RT. The reaction was stopped using 100 μl of stop mix and the optical density was read at 450 nm. The quantity of PSA in each ml media was calculated by reference to the curve obtained from the readings of standard solutions.

[0273] As can be seen in FIG. 13, the presence of the presence of Hsp72 in a cell greatly increases the amount of PSA secretion observed upon administration of Tg. This confirms that Hsp72 regulates secretion of PSA by CHO cells, likely mediated by the modulation of IRE1α/XBP1 function.

### REFERENCES

[0274] 1. Morimoto R I, Kline M P, Bimston D N, Cotto J J (1997) The heat-shock response: regulation and function of heat-shock proteins and molecular chaperones. Essays Biochem 32: 17-29.
[0275] 2. Tavaria M, Gabriele T, Kola I, Anderson RL (1996) A hitchhiker's guide to the human Hsp70 family. Cell Stress Chaperones 1: 23-28.
[0276] 3. Gamido C, Schmitt E, Cande C, Vahsen N, Parcellier A, et al. (2003) HSP27 and HSP70: potentially oncogenic apoptosis inhibitors. Cell Cycle 2: 579-584.
[0277] 4. Samali A, Orrenius S (1998) Heat shock proteins: regulators of stress response and apoptosis. Cell Stress Chaperones 3: 228-236.
[0278] 5. Samali A, Cotter TG (1996) Heat shock proteins increase resistance to apoptosis. Exp Cell Res 223: 163-170.
[0279] 6. Lanneau D, Brunet M, Frisan E, Solary E, Fontenay M, et al. (2008) Heat shock proteins: essential proteins for apoptosis regulation. J Cell Mol Med 12: 743-761.
[0280] 7. Saleh A, Srinivasula S M, Balkir L, Robbins P D, Alnemri E S (2000) Negative regulation of the Apaf-1 apoptosome by Hsp70. Nat Cell Biol 2: 476-483.
[0281] 8. Beere H M, Wolf B B, Cain K, Mosser D D, Mahboubi A, et al. (2000) Heat-shock protein 70 inhibits apoptosis by preventing recruitment of procaspase-9 to the Apaf-1 apoptosome. Nat Cell Biol 2: 469-475.
[0282] 9. Bivik C, Rosdahl I, Ollinger K (2007) Hsp70 protects against UVB induced apoptosis by preventing release of cathepsins and cytochrome c in human melanocytes. Carcinogenesis 28: 537-544.
[0283] 10. Gotoh T, Terada K, Oyadomari S, Mori M (2004) hsp70-DnaJ chaperone pair prevents nitric oxide- and CHOP-induced apoptosis by inhibiting translocation of Bax to mitochondria. Cell Death Differ 11: 390-402.
[0284] 11. Stankiewicz A R, Lachapelle G, Foo C P, Radicioni S M, Mosser DD (2005) Hsp70 inhibits heat-induced apoptosis upstream of mitochondria by preventing Bax translocation. J Biol Chem 280: 38729-38739.
[0285] 12. Gabai V L, Meriin A B, Yaglom J A, Volloch V Z, Sherman M Y (1998) Role of Hsp70 in regulation of stress-kinase JNK: implications in apoptosis and aging. FEBS Lett 438: 1-4.
[0286] 13. Gurbuxani S, Schmitt E, Cande C, Parcellier A, Hammann A, et al. (2003) Heat shock protein 70 binding inhibits the nuclear import of apoptosis-inducing factor. Oncogene 22: 6669-6678.
[0287] 14. Kroemer G (2001) Heat shock protein 70 neutralizes apoptosis-inducing factor. ScientificWorldJournal 1: 590-592.
[0288] 15. Matsumori Y, Hong S M, Aoyama K, Fan Y, Kayama T, et al. (2005) Hsp70 overexpression sequesters AIF and reduces neonatal hypoxic/ischemic brain injury. J Cereb Blood Flow Metab 25: 899-910.
[0289] 16. Lin J H, Walter P, Yen T S (2008) Endoplasmic reticulum stress in disease pathogenesis. Annu Rev Pathol 3: 399-425.
[0290] 17. Ron D, Walter P (2007) Signal integration in the endoplasmic reticulum unfolded protein response. Nat Rev Mol Cell Biol 8: 519-529.
[0291] 18. Schroder M, Kaufman R J (2005) The mammalian unfolded protein response. Annu Rev Biochem 74: 739-789.
[0292] 19. Szegezdi E, Logue S E, Gorman A M, Samali A (2006) Mediators of endoplasmic reticulum stress-induced apoptosis. EMBO Rep 7: 880-885.
[0293] 20. Calfon M, Zeng H, Urano F, Till J H, Hubbard S R, et al. (2002) IRE1 couples endoplasmic reticulum load to secretory capacity by processing the XBP-1 mRNA. Nature 415: 92-96.
[0294] 21. Lee A H, Iwakoshi N N, Glimcher L H (2003) XBP-1 regulates a subset of endoplasmic reticulum resident chaperone genes in the unfolded protein response. Mol Cell Biol 23: 7448-7459.
[0295] 22. Yamamoto K, Yoshida H, Kokame K, Kaufman R J, Mori K (2004) Differential contributions of ATF6 and XBP1 to the activation of endoplasmic reticulum stress-responsive cis-acting elements ERSE, UPRE and ERSE-II. J Biochem 136: 343-350.
[0296] 23. Yoshida H, Matsui T, Yamamoto A, Okada T, Mori K (2001) XBP1 mRNA is induced by ATF6 and spliced by IRE1 in response to ER stress to produce a highly active transcription factor. Cell 107: 881-891.
[0297] 24. Hetz C, Glimcher L (2008) The daily job of night killers: alternative roles of the BCL-2 family in organelle physiology. Trends Cell Biol 18: 38-44.
[0298] 25. Hetz C, Glimcher LH (2009) Fine-tuning of the unfolded protein response: Assembling the IRE1alpha interactome. Mol Cell 35: 551-561.
[0299] 26. Hetz C, Bernasconi P, Fisher J, Lee A H, Bassik M C, et al. (2006) Proapoptotic BAX and BAK modulate the unfolded protein response by a direct interaction with IRE1alpha. Science 312: 572-576.
[0300] 27. Luo D, He Y, Zhang H, Yu L, Chen H, et al. (2008) AIP1 is critical in transducing IRE1-mediated endoplasmic reticulum stress response. J Biol Chem 283: 11905-11912.
[0301] 28. Lisbona F, Rojas-Rivera D, Thielen P, Zamorano S, Todd D, et al. (2009) BAX inhibitor-1 is a negative regulator of the ER stress sensor IRE1alpha. Mol Cell 33: 679-691.
[0302] 29. Xu C, Xu W, Palmer A E, Reed J C (2008) BI-1 regulates endoplasmic reticulum Ca2+ homeostasis downstream of Bcl-2 family proteins. J Biol Chem 283: 11477-11484.
[0303] 30. Gu F, Nguyen D T, Stuible M, Dube N, Tremblay M L, et al. (2004) Protein-tyrosine phosphatase 1B potentiates IRE1 signaling during endoplasmic reticulum stress. J Biol Chem 279: 49689-49693.
[0304] 31. Yenari M A, Giffard R G, Sapolsky R M, Steinberg G K (1999) The neuroprotective potential of heat shock protein 70 (HSP70). Mol Med Today 5: 525-531.
[0305] 32. Giffard R G, Yenari M A (2004) Many mechanisms for hsp70 protection from cerebral ischemia. J Neurosurg Anesthesiol 16: 53-61.
[0306] 33. Xu L, Lee J E, Giffard R G (1999) Overexpression of bcl-2, bcl-XL or hsp70 in murine cortical astrocytes reduces injury of co-cultured neurons. Neurosci Lett 277: 193-197.
[0307] 34. Plumier J C, Krueger A M, Currie R W, Kontoyiannis D, Kollias G, et al. (1997) Transgenic mice expressing the human inducible Hsp70 have hippocampal neurons resistant to ischemic injury. Cell Stress Chaperones 2: 162-167.
[0308] 35. Rajdev S, Hara K, Kokubo Y, Mestril R, Dillmann W, et al. (2000) Mice overexpressing rat heat shock protein 70 are protected against cerebral infarction. Ann Neurol 47: 782-791.
[0309] 36. Kelly S, Zhang Z J, Zhao H, Xu L, Giffard R G, et al. (2002) Gene transfer of HSP72 protects cornu ammonis 1 region of the hippocampus neurons from global ischemia: influence of Bcl-2. Ann Neurol 52: 160-167.
[0310] 37. Papadopoulos M C, Sun X Y, Cao J, Mivechi N F, Giffard RG (1996) Over-expression of HSP-70 protects astrocytes from combined oxygen-glucose deprivation. Neuroreport 7: 429-432.
[0311] 38. Zamzami N, Kroemer G (2001) The mitochondrion in apoptosis: how Pandora's box opens. Nat Rev Mol Cell Biol 2: 67-71.
[0312] 39. Gupta S, Kass G E, Szegezdi E, Joseph B (2009) The mitochondrial death pathway: A promising therapeutic target in Diseases. J Cell Mol. Med.
[0313] 40. Yoshida H, Matsui T, Hosokawa N, Kaufman R J, Nagata K, et al. (2003) A time-dependent phase shift in the mammalian unfolded protein response. Dev Cell 4: 265-271.
[0314] 41. Lin J H, Li H, Zhang Y, Ron D, Walter P (2009) Divergent effects of PERK and IRE1 signaling on cell viability. PLoS ONE 4: e4170.
[0315] 42. Miura M, Yuan J (2000) Transient transfection assay of cell death genes. Methods Enzymol 322: 480-492.
[0316] 43. Quigney D J, Gorman A M, Samali A (2003) Heat shock protects PC12 cells against MPP+ toxicity. Brain Res 993: 133-139.
[0317] 44. Iwakoshi N N, Lee A H, Vallabhajosyula P, Otipoby K L, Rajewsky K, et al. (2003) Plasma cell differentiation and the unfolded protein response intersect at the transcription factor XBP-1. Nat Immunol 4: 321-329.
[0318] 45. Lee A H, Chu G C, Iwakoshi N N, Glimcher L H (2005) XBP-1 is required for biogenesis of cellular secretory machinery of exocrine glands. EMBO J. 24: 4368-4380.
[0319] 46. Reimold A M, Iwakoshi N N, Manis J, Vallabhajosyula P, Szomolanyi-Tsuda E, et al. (2001) Plasma cell differentiation requires the transcription factor XBP-1. Nature 412: 300-307.
[0320] 47. Ryu E J, Harding H P, Angelastro J M, Vitolo O V, Ron D, et al. (2002) Endoplasmic reticulum stress and the unfolded protein response in cellular models of Parkinson's disease. J Neurosci 22: 10690-10698.
[0321] 48. Matus S, Lisbona F, Tones M, Leon C, Thielen P, et al. (2008) The stress rheostat: an interplay between the unfolded protein response (UPR) and autophagy in neurodegeneration. Curr Mol Med 8: 157-172.
[0322] 49. Kim I, Xu W, Reed JC (2008) Cell death and endoplasmic reticulum stress: disease relevance and therapeutic opportunities. Nat Rev Drug Discov 7: 1013-1030.
[0323] 50. Steel R, Doherty J P, Buzzard K, Clemons N, Hawkins C J, et al. (2004) Hsp72 inhibits apoptosis upstream of the mitochondria and not through interactions with Apaf-1. J Biol Chem 279: 51490-51499.
[0324] 51. Sun Y, Ouyang Y B, Xu L, Chow A M, Anderson R, et al. (2006) The carboxyl-terminal domain of inducible Hsp70 protects from ischemic injury in vivo and in vitro. J Cereb Blood Flow Metab 26: 937-950.
[0325] 52. Ravagnan L, Gurbuxani S, Susin S A, Maisse C, Daugas E, et al. (2001) Heat-shock protein 70 antagonizes apoptosis-inducing factor. Nat Cell Biol 3: 839-843.
[0326] 53. Volloch V, Gabai V L, Rits S, Sherman M Y (1999) ATPase activity of the heat shock protein hsp72 is dispensable for its effects on dephosphorylation of stress kinase JNK and on heat-induced apoptosis. FEBS Lett 461: 73-76.
[0327] 54. Holtz W A, O'Malley KL (2003) Parkinsonian mimetics induce aspects of unfolded protein response in death of dopaminergic neurons. J Biol Chem 278: 19367-19377.
[0328] 55. Gorman A M, Szegezdi E, Quigney D J, Samali A (2005) Hsp27 inhibits 6-hydroxydopamine-induced cytochrome c release and apoptosis in PC12 cells. Biochem Biophys Res Commun 327: 801-810.
[0329] 56. Bush K T, Goldberg A L, Nigam S K (1997) Proteasome inhibition leads to a heat-shock response, induction of endoplasmic reticulum chaperones, and thermotolerance. Biol Chem 272: 9086-9092.
[0330] 57. Szokalska A, Makowski M, Nowis D, Wilczynski G M, Kujawa M, et al. (2009) Proteasome inhibition potentiates antitumor effects of photodynamic therapy in mice through induction of endoplasmic reticulum stress and unfolded protein response. Cancer Res 69: 4235-4243.
[0331] 58. Ciocca D R, Calderwood S K (2005) Heat shock proteins in cancer: diagnostic, prognostic, predictive, and treatment implications. Cell Stress Chaperones 10: 86-103.
[0332] 59. Koumenis C, Naczki C, Koritzinsky M, Rastani S, Diehl A, et al. (2002) Regulation of protein synthesis by hypoxia via activation of the endoplasmic reticulum kinase PERK and phosphorylation of the translation initiation factor eIF2alpha. Mol Cell Biol 22: 7405-7416.
[0333] 60. Harris A L (2002) Hypoxia—a key regulatory factor in tumour growth. Nat Rev Cancer 2: 38-47.
[0334] 61. Lin J H, Li H, Yasumura D, Cohen H R, Zhang C, et al. (2007) IRE1 signaling affects cell fate during the unfolded protein response. Science 318: 944-949.
[0335] 62. Niwa M, Sidrauski C, Kaufman R J, Walter P (1999) A role for presenilin-1 in nuclear accumulation of Ire1 fragments and induction of the mammalian unfolded protein response. Cell 99: 691-702.
[0336] 63. Marcu M G, Doyle M, Bertolotti A, Ron D, Hendershot L, et al. (2002) Heat shock protein 90 modulates the unfolded protein response by stabilizing IRE1 alpha. Mol Cell Biol 22: 8506-8513.
[0337] 64. Ogata M, Hino S, Saito A, Morikawa K, Kondo S, et al. (2006) Autophagy is activated for cell survival after endoplasmic reticulum stress. Mol Cell Biol 26: 9220-9231.
[0338] 65. Concannon C G, FitzGerald U, Holmberg C I, Szegezdi E, Sistonen L, et al. (2005) CD95-mediated alteration in Hsp70 levels is dependent on protein stabilization. Cell Stress Chaperones 10: 59-65.
[0339] 66. Samali A, Cai J, Zhivotovsky B, Jones D P, Orrenius S (1999) Presence of a pre-apoptotic complex of pro-caspase-3, Hsp60 and Hsp10 in the mitochondrial fraction of jurkat cells. EMBO J. 18: 2040-2048.
[0340] 67. Lee Y, Wong K, Tan J, Toh P, Mao Y, Brusic V, Yap M (2009) Overexpression of heat shock proteins (HSPs) in CHO cells for extended culture viability and improved recombinant protein production. Journal of Biotechnology 143: 34-43.
[0341] 68. Sambrook et al, 1989; Ausubel et al, 1991; Spector, Goldman & Leinwald, 1998.
[0342] 69. Mack Pub. Co., N.J. 1991.
[0343] 70. WO05/056596
[0344] 71. WO2009/077857
[0345] 72. WO/2009/066174
[0346] 73. Uemura A, Oku M, Mori K, Yoshida H. (2009) Unconventional splicing of XBP1 mRNA occurs in the cytoplasm during the mammalian unfolded protein response. J Cell Sci. 122(Pt 16):2877-86.
[0347] 74. Massey A, Williamson D, Browne H, Murray J, Dokurno P, Shaw T, Macias A, Daniels Z, Geoffroy S, Dopson M, Lavan P, Matassova N, Francis G, Graham C, Parsons R, Wang Y, Padfeild A, corner M, Drysdale M, Wood, M (2009) A novel, small molecule inhibitor of Hsc70/Hsp70 potentiates Hsp90 inhibitor induced apoptosis in HCT116 colon carcinoma cells. Cancer Chemother Pharmacol. 1194-1203.
[0348] 75. Kummar S, Gutierrez M, Gardner E, Chen X, Figg W, Zajac-Kaye M, Chen M, Steinberg S, Muir C, Yancey M, Horneffer Y, Juwara L, Melillo G, Ivy S, Merino M, Neckers L, Steeg P, Conley B, Giaccone G, Doroshow J, Murgo A. (2010) Phase I clinical trials of 17-dimethylamino ethyl amino-17-demethoxygeldanamycin (17-DMAG), a heat shock protein inhibitor, administered twice weekly in patients with advanced malignancies. European Journal of Cancer 46, 340-347.
[0349] 76. Leu J, Pimkina J, Frank A, Murphy M, George D. (2009) A small molecule inhibitor of inducible heat shock protein 70 (HSP70). Mol. Cell. 36(1) 15-27.
[0350] 77. Galluzzi L, Giordanetto F, Kroemer G (2009). Targeting Hsp70 for cancer therapy. Molecular cell 36, 176-177.
[0351] 78. Terada K, Mori M (2000). Human DnaJ homologs dj2 and dj3, and bag-1 are positive chaperones of hsc60. The Journal of Biological Chemistry 275(32), 24728-24734.
[0352] 79. Urano F, Wang X, Bertolotti A, Zhang Y, Chung P, Harding H P, Ron D. (2000). Coupling of Stress in the ER to Activation of JNK Protein Kinases by Transmembrane Protein Kinase IRE1. Science 287, 664-666.
[0353] 80. Matsuzawa A, Nishitoh H, Tobiume K, Takeda K, Ichijo H. (2002). Physiological Roles of ASK1-Mediated Signal Transduction in Oxidative Stress- and Endoplasmic Reticulum Stress-Induced Apoptosis: Advanced Findings from ASK1 Knockout Mice. Antioxid. Redox Signal. 4, 415-425.
[0354] 81. Nishitoh H, Matsuzawa A, Tobiume K, Saegusa K, Takeda K, Inoue K, Hori S, Kakizuka A, Ichijo H. (2002). ASK1 is essential for endoplasmic reticulum stress-induced neuronal cell death triggered by expanded polyglutamine repeats. Genes Dev. 16, 1345-1355.
[0355] 82. Hollien J, Lin J H, Li H, Stevens N, Walter P, Weissman J S. (2009). Regulated Ire1-dependent decay of messenger RNAs in mammalian cells. J. Cell Biol. 186(3):323-31.
[0356] 83. Hollien J, Weissman JS. (2006). Decay of endoplasmic reticulum-localized mRNAs during the unfolded protein response. Science. 313(5783):104-7.
[0357] 84. Han D, Lerner A G, Vande Walle L, Upton J P, Xu W, Hagen A, Backes B J, Oakes S A, Papa F R. (2009). IRE1 alpha kinase activation modes control alternate endoribonuclease outputs to determine divergent cell fates. Cell. 138(3):562-75.
[0358] 85. Dong B, Niwa M, Walter P, Silverman RH. (2001). Basis for regulated RNA cleavage by functional analysis of RNase L and Ire1p. RNA. 7(3):361-73.
[0359] 86. Zhang C, Kawauchi J, Adachi M T, Hashimoto Y, Oshiro S, Aso T, Kitajima S. (2001). Activation of JNK and transcriptional repressor ATF3/LRF1 through the IRE1/TRAF2 pathway is implicated in human vascular endothelial cell death by homocysteine. Biochem Biophys Res Commun. 289(3):718-24.

The application's sequence listing, which the Patent Office published only in electronic form, follows.

SEQUENCE LISTING (52 sequences)

SEQ ID NO: 1 - DNA, 1820 bp, Homo sapiens
ggcgctgggcggctgcggcgcgcggtgcgcggtgcgtagtctggagctatggtggtggtggcagccgcgccgaacccggccgacgggacccctaaagttctgcttctgtcggggcagcccgcctccgccgccggagccccggccggccaggccctgccgctcatggtgccagcccagagaggggccagcccggaggcagcgagcggggggctgccccaggcgcgcaagcgacagcgcctcacgcacctgagccccgaggagaaggcgctgaggaggaaactgaaaaacagagtagcagctcagactgccagagatcgaaagaaggctcgaatgagtgagctggaacagcaagtggtagatttagaagaagagaaccaaaaacttttgctagaaaatcagcttttacgagagaaaactcatggccttgtagttgagaaccaggagttaagacagcgcttggggatggatgccctggttgctgaagaggaggcggaagccaaggggaatgaagtgaggccagtggccgggtctgctgagtccgcagcactcagactacgtgcacctctgcagcaggtgcaggcccagttgtcacccctccagaacatctccccatggattctggcggtattgactcttcagattcagagtctgatatcctgttgggcattctggacaacttggacccagtcatgttcttcaaatgcccttccccagagcctgccagcctggaggagctcccagaggtctacccagaaggacccagttccttaccagcctccctttctctgtcagtggggacgtcatcagccaagctggaagccattaatgaactaattcgttttgaccacatatataccaagcccctagtcttagagataccctctgagacagagagccaagctaatgtggtagtgaaaatcgaggaagcacctctcagcccctcagagaatgatcaccctgaattcattgtctcagtgaaggaagaacctgtagaagatgacctcgttccggagctgggtatctcaaatctgctttcatccagccactgcccaaagccatcttcctgcctactggatgcttacagtgactgtggatacgggggttccctttccccattcagtgacatgtcctctctgcttggtgtaaaccattcttgggaggacacttttgccaatgaactctttccccagctgattagtgtctaaggaatgatccaatactgttgcccttttccttgactattacactgcctggaggatagcagagaagcctgtctgtacttcattcaaaaagccaaaatagagagtatacagtcctagagaattcctctatttgttcagatctcatagatgacccccaggtattgtcttttgacatccagcagtccaaggtattgagacatattactggaagtaagaaatattactataattgagaactacagcttttaagattgtacttttatcttaaaagggtggtagttttccctaaaatacttattatgtaagggtcattagacaaatgtcttgaagtagacatggaatttatgaatggttctttatcatttctcttccccctttttggcatcctggcttgcctccagttttaggtcctttagtttgcttctgtaagcaacgggaacacctgctgagggggctctttccctcatgtatacttcaagtaagatcaagaatcttttgtgaaattatagaaatttactatgtaaatgcttgatggaattttttcctgctagtgtagcttctgaaaggtgctttctccatttatttaaaactacccatgcaattaaaaggtacaatgca

SEQ ID NO: 2 - protein, 261 aa, Homo sapiens
MVVVAAAPNPADGTPKVLLLSGQPASAAGAPAGQALPLMVPAQRGASPEAASGGLPQARKRQRLTHLSPEEKALRRKLKNRVAAQTARDRKKARMSELEQQVVDLEEENQKLLLENQLLREKTHGLVVENQELRQRLGMDALVAEEEAEAKGNEVRPVAGSAESAALRLRAPLQQVQAQLSPLQNISPWILAVLTLQIQSLISCWAFWTTWTQSCSSNALPQSLPAWRSSQRSTQKDPVPYQPPFLCQWGRHQPSWKPLMN

SEQ ID NO: 3 - DNA, 1810 bp, Homo sapiens
ggcgctgggcggctgcggcgcgcggtgcgcggtgcgtagtctggagctatggtggtggtggcagccgcgccgaacccggccgacgggacccctaaagttctgcttctgtcggggcagcccgcctccgccgccggagccccggccggccaggccctgccgctcatggtgccagcccagagaggggccagcccggaggcagcgagcggggggctgccccaggcgcgcaagcgacagcgcctcacgcacctgagccccgaggagaaggcgctgaggaggaaactgaaaaacagagtagcagctcagactgccagagatcgaaagaaggctcgaatgagtgagctggaacagcaagtggtagatttagaagaagagaaccaaaaacttttgctagaaaatcagcttttacgagagaaaactcatggccttgtagttgagaaccaggagttaagacagcgcttggggatggatgccctggttgctgaagaggaggcggaagccaaggggaatgaagtgaggccagtggccgggtctgctgagtccgcagcaggtgcaggcccagttgtcacccctccagaacatctccccatggattctggcggtattgactcttcagattcagagtctgatatcctgttgggcattctggacaacttggacccagtcatgttcttcaaatgcccttccccagagcctgccagcctggaggagctcccagaggtctacccagaaggacccagttccttaccagcctccctttctctgtcagtggggacgtcatcagccaagctggaagccattaatgaactaattcgttttgaccacatatataccaagcccctagtcttagagataccctctgagacagagagccaagctaatgtggtagtgaaaatcgaggaagcacctctcagcccctcagagaatgatcaccctgaattcattgtctcagtgaaggaagaacctgtagaagatgacctcgttccggagctgggtatctcaaatctgctttcatccagccactgcccaaagccatcttcctgcctactggatgcttacagtgactgtggatacgggggttccctttccccattcagtgacatgtcctctctgcttggtgtaaaccattcttgggaggacacttttgccaatgaactctttccccagctgattagtgtctaaggaatgatccaatactgttgcccttttccttgactattacactgcctggaggatagcagagaagcctgtctgtacttcattcaaaaagccaaaatagagagtatacagtcctagagaattcctctatttgttcagatctcatagatgacccccaggtattgtcttttgacatccagcagtccaaggtattgagacatattactggaagtaagaaatattactataattgagaactacagcttttaagattgtacttttatcttaaaagggtggtagttttccctaaaatacttattatgtaagggtcattagacaaatgtcttgaagtagacatggaatttatgaatggttctttatcatttctcttccccctttttggcatcctggcttgcctccagttttaggtcctttagtttgcttctgtaagcaacgggaacacctgctgagggggctctttccctcatgtatacttcaagtaagatcaagaatcttttgtgaaattatagaaatttactatgtaaatgcttgatggaattttttcctgctagtgtagcttctgaaaggtgctttctccatttatttaaaactacccatgcaattaaaaggtacaatgcaaaaaaaaaaaaaaaaa

SEQ ID NO: 4 - protein, 376 aa, Homo sapiens
MVVVAAAPNPADGTPKVLLLSGQPASAAGAPAGQALPLMVPAQRGASPEAASGGLPQARKRQRLTHLSPEEKALRRKLKNRVAAQTARDRKKARMSELEQQVVDLEEENQKLLLENQLLREKTHGLVVENQELRQRLGMDALVAEEEAEAKGNEVRPVAGSAESAAGAGPVVTPPEHLPMDSGGIDSSDSESDILLGILDNLDPVMFFKCPSPEPASLEELPEVYPEGPSSLPASLSLSVGTSSAKLEAINELIRFDHIYTKPLVLEIPSETESQANVVVKIEEAPLSPSENDHPEFIVSVKEEPVEDDLVPELGISNLLSSSHCPKPSSCLLDAYSDCGYGGSLSPFSDMSSLLGVNHSWEDTFANELFPQLISV

SEQ ID NO: 5 - DNA, 4005 bp, Homo sapiens
tgcctagtcagttctgcgtccgctgaggctcggtcaccgcctcgctgtcgtcgcggcgcccccgccccgtcctctgtccgtaccgcccccggagccagggccgagtcctcgccatgccggcccggcggctgctgctgctgctgacgctgctgctgcccggcctcgggatttttggaagtaccagcacagtgacgcttcctgaaaccttgttgtttgtgtcaacgctggatggaagtttgcatgctgtcagcaagaggacaggctcaatcaaatggactttaaaagaagatccagtcctgcaggtcccaacacatgtggaagagcctgcctttctcccagatcctaatgatggcagcctgtatacgcttggaagcaagaataatgaaggcctgacgaaacttccttttaccatcccagaattggtgcaggcatccccatgccgaagttcagatggaatcctctacatgggtaaaaagcaggacatctggtatgttattgacctcctgaccggagagaagcagcagactttgtcatcggcctttgcagatagtctctgcccatcaacctctcttctgtatcttgggcgaacagaatacaccatcaccatgtacgacaccaaaacccgagagctccggtggaatgccacctactttgactatgcggcctcactgcctgaggacgacgtggactacaagatgtcccactttgtgtccaatggtgatgggctggtggtgactgtggacagtgaatctggggacgtcctgtggatccaaaactacgcctcccctgtggtggccttttatgtctggcagcgggagggtctgaggaaggtgatgcacatcaatgtcgctgtggagaccctgcgctatctgaccttcatgtctggggaggtggggcgcatcacaaagtggaagtacccgttccccaaggagacagaggccaagagcaagctgacgcccactctgtatgttgggaaatactctaccagcctctatgcctctccctcaatggtacacgagggggttgctgtcgtgccccgcggcagcacacttcctttgctggaagggccccagactgatggcgtcaccattggggacaagggggagtgtgtgatcacgcccagcacggacgtcaagtttgatcccggactcaaaagcaagaacaagctcaactacttgaggaattactggcttctgataggacaccatgaaaccccactgtctgcgtctaccaagatgctggagagatttcccaacaatctacccaaacatcgggaaaatgtgattcctgctgattcagagaaaaagagctttgaggaagttatcaacctggttgaccagacttcagaaaacgcacctaccaccgtgtctcgggatgtggaggagaagcccgcccatgcccctgcccggcccgaggcccccgtggactccatgcttaaggacatggctaccatcatcctgagcaccttcctgctgattggctgggtggccttcatcatcacctatcccctgagcatgcatcagcagcagcagctccagcaccagcagttccagaaggaactggagaagatccagctcctgcagcagcagcagcagcagctgcccttccacccacctggagacacggctcaggacggcgagctcctggacacgtctggcccgtactcagagagctcgggcaccagcagccccagcacgtcccccagggcctccaaccactcgctctgctccggcagctctgcctccaaggctggcagcagcccctccctggaacaagacgatggagatgaggaaaccagcgtggtgatagttgggaaaatttccttctgtcccaaggatgtcctgggccatggagctgagggcacaattgtgtaccggggcatgtttgacaaccgcgacgtggccgtgaagaggatcctccccgagtgttttagcttcgcagaccgtgaggtccagctgttgcgagaatcggatgagcacccgaacgtgatccgctacttctgcacggagaaggaccggcaattccagtacattgccatcgagctgtgtgcagccaccctgcaagagtatgtggagcagaaggactttgcgcatctcggcctggagcccatcaccttgctgcagcagaccacctcgggcctggcccacctccactccctcaacatcgttcacagagacctaaagccacacaacatcctcatatccatgcccaatgcacacggcaagatcaaggccatgatctccgactttggcctctgcaagaagctggcagtgggcagacacagtttcagccgccgatctggggtgcctggcacagaaggctggatcgctccagagatgctgagcgaagactgtaaggagaaccctacctacacggtggacatcttttctgcaggctgcgtcttttactacgtaatctctgagggcagccacccttttggcaagtccctgcagcggcaggccaacatcctcctgggtgcctgcagccttgactgcttgcacccagagaagcacgaagacgtcattgcacgtgaattgatagagaagatgattgcgatggatcctcagaaacgcccctcagcgaagcatgtgctcaaacacccgttcttctggagcctagagaagcagctccagttcttccaggacgtgagcgacagaatagaaaaggaatccctggatggcccgatcgtgaagcagttagagagaggcgggagagccgtggtgaagatggactggcgggagaacatcactgtccccctccagacagacctgcgtaaattcaggacctataaaggtggttctgtcagagatctcctccgagccatgagaaataagaagcaccactaccgggagctgcctgcagaggtgcgggagacgctggggtccctccccgacgacttcgtgtgctacttcacatctcgcttcccccacctcctcgcacacacctaccgggccatggagctgtgcagccacgagagactcttccagccctactacttccacgagcccccagagccccagcccccagtgactccagacgccctctgagcgagggcggcccctctgttctggtggccccagctgtgactgagggcctggtcaccacaattagagcttgatgcctcccggctttgcagggagaccaggcttcccaaaccaagtgccttgagctgcctgctctgcagcccacagaggacagtgctgaccccaggaagtgggagaagtggcccctcgtgacctacagggaactgggaagatgctggccccaaaagccttacggtcatgatgtctgcaaaggagggcctcagagacagcgcgagtagcacccccagccatctactggataaacttgcttcagactttttaaattcctgcttaatgtcagtctacaggcctttcaggaagggagaggagggaatcgtacattttgcttgcgtgctgggacagctaggctgagatgcaccaagtacagccttcactggagaccggaattgagaggtgggggatgctgaggagggggaggacggagttcagagggtgtcgtcctgcagtgtgagatttctcattgatcacagatgtgcccagagtagcccaggtcactgttaactagtgtttctgcagaggcagcaggagccatgagcatgaggtgtggcattagggactggtcagctatgcatgctggcaggtggggttgtgtctgcaggtctcagaaatgaagaggctgctctgttctggaggcagccgtggcccagtgccagtggccagaacagtggcctttggtgggtgtgtcccgggccatctcggggtggtgctcaggagcgcctggggcaagaggtaaagagttccctggccttcaaggagagcagcgaagacccagacaggggccagccttcaggaccagagggaggccgccgaatgggaccctcctggtcaccaggagaaagccctgggccagcgagtaggcagtcaaactccttcgtccccaaggccggtggaacaagaggct

SEQ ID NO: 6 - protein, 977 aa, Homo sapiens
MPARRLLLLLTLLLPGLGIFGSTSTVTLPETLLFVSTLDGSLHAVSKRTGSIKWTLKEDPVLQVPTHVEEPAFLPDPNDGSLYTLGSKNNEGLTKLPFTIPELVQASPCRSSDGILYMGKKQDIWYVIDLLTGEKQQTLSSAFADSLCPSTSLLYLGRTEYTITMYDTKTRELRWNATYFDYAASLPEDDVDYKMSHFVSNGDGLVVTVDSESGDVLWIQNYASPVVAFYVWQREGLRKVMHINVAVETLRYLTFMSGEVGRITKWKYPFPKETEAKSKLTPTLYVGKYSTSLYASPSMVHEGVAVVPRGSTLPLLEGPQTDGVTIGDKGECVITPSTDVKFDPGLKSKNKLNYLRNYWLLIGHHETPLSASTKMLERFPNNLPKHRENVIPADSEKKSFEEVINLVDQTSENAPTTVSRDVEEKPAHAPARPEAPVDSMLKDMATIILSTFLLIGWVAFIITYPLSMHQQQQLQHQQFQKELEKIQLLQQQQQQLPFHPPGDTAQDGELLDTSGPYSESSGTSSPSTSPRASNHSLCSGSSASKAGSSPSLEQDDGDEETSVVIVGKISFCPKDVLGHGAEGTIVYRGMFDNRDVAVKRILPECFSFADREVQLLRESDEHPNVIRYFCTEKDRQFQYIAIELCAATLQEYVEQKDFAHLGLEPITLLQQTTSGLAHLHSLNIVHRDLKPHNILISMPNAHGKIKAMISDFGLCKKLAVGRHSFSRRSGVPGTEGWIAPEMLSEDCKENPTYTVDIFSAGCVFYYVISEGSHPFGKSLQRQANILLGACSLDCLHPEKHEDVIARELIEKMIAMDPQKRPSAKHVLKHPFFWSLEKQLQFFQDVSDRIEKESLDGPIVKQLERGGRAVVKMDWRENITVPLQTDLRKFRTYKGGSVRDLLRAMRNKKHHYRELPAEVRETLGSLPDDFVCYFTSRFPHLLAHTYRAMELCSHERLFQPYYFHEPPEPQPPVTPDAL

SEQ ID NO: 7 - DNA, 2379 bp, Homo sapiens
cctttttcgagagtgactcccgttgtcccaaggcttcccagagcgaacctgtgcggctgcaggcaccggcgcgtcgagtttccggcgtccggaaggaccgagctcttctcgcggatccagtgttccgtttccagcccccaatctcagagcggagccgacagagagcagggaaccggcatggccaaagccgcggcgatcggcatcgacctgggcaccacctactcctgcgtgggggtgttccaacacggcaaggtggagatcatcgccaacgaccagggcaaccgcaccacccccagctacgtggccttcacggacaccgagcggctcatcggggatgcggccaagaaccaggtggcgctgaacccgcagaacaccgtgtttgacgcgaagcggctgatcggccgcaagttcggcgacccggtggtgcagtcggacatgaagcactggcctttccaggtgatcaacgacggagacaagcccaaggtgcaggtgagctacaagggggagaccaaggcattctaccccgaggagatctcgtccatggtgctgaccaagatgaaggagatcgccgaggcgtacctgggctacccggtgaccaacgcggtgatcaccgtgccggcctacttcaacgactcgcagcgccaggccaccaaggatgcgggtgtgatcgcggggctcaacgtgctgcggatcatcaacgagcccacggccgccgccatcgcctacggcctggacagaacgggcaagggggagcgcaacgtgctcatctttgacctgggcgggggcaccttcgacgtgtccatcctgacgatcgacgacggcatcttcgaggtgaaggccacggccggggacacccacctgggtggggaggactttgacaacaggctggtgaaccacttcgtggaggagttcaagagaaaacacaagaaggacatcagccagaacaagcgagccgtgaggcggctgcgcaccgcctgcgagagggccaagaggaccctgtcgtccagcacccaggccagcctggagatcgactccctgtttgagggcatcgacttctacacgtccatcaccagggcgaggttcgaggagctgtgctccgacctgttccgaagcaccctggagcccgtggagaaggctctgcgcgacgccaagctggacaaggcccagattcacgacctggtcctggtcgggggctccacccgcatccccaaggtgcagaagctgctgcaggacttcttcaacgggcgcgacctgaacaagagcatcaaccccgacgaggctgtggcctacggggcggcggtgcaggcggccatcctgatgggggacaagtccgagaacgtgcaggacctgctgctgctggacgtggctcccctgtcgctggggctggagacggccggaggcgtgatgactgccctgatcaagcgcaactccaccatccccaccaagcagacgcagatcttcaccacctactccgacaaccaacccggggtgctgatccaggtgtacgagggcgagagggccatgacgaaagacaacaatctgttggggcgcttcgagctgagcggcatccctccggcccccaggggcgtgccccagatcgaggtgaccttcgacatcgatgccaacggcatcctgaacgtcacggccacggacaagagcaccggcaaggccaacaagatcaccatcaccaacgacaagggccgcctgagcaaggaggagatcgagcgcatggtgcaggaggcggagaagtacaaagcggaggacgaggtgcagcgcgagagggtgtcagccaagaacgccctggagtcctacgccttcaacatgaagagcgccgtggaggatgaggggctcaagggcaagatcagcgaggcggacaagaagaaggttctggacaagtgtcaagaggtcatctcgtggctggacgccaacaccttggccgagaaggacgagtttgagcacaagaggaaggagctggagcaggtgtgtaaccccatcatcagcggactgtaccagggtgccggtggtcccgggcctgggggcttcggggctcagggtcccaagggagggtctgggtcaggccccaccattgaggaggtggattaggggcctttccaagattgctgtttttgttttggagcttcaagactttgcatttcctagtatttctgtttgtcagttctcaatttcctgtgtttgcaatgttgaaattttttggtgaagtactgaacttgctttttttccggtttctacatgcagagatgaatttatactgccatcttacgactatttcttctttttaatacacttaactcaggccattttttaagttggttacttcaaagtaaataaactttaaaattcaaaaaaaaaaaaaaaaaa

SEQ ID NO: 8 - protein, 641 aa, Homo sapiens
MAKAAAIGIDLGTTYSCVGVFQHGKVEIIANDQGNRTTPSYVAFTDTERLIGDAAKNQVALNPQNTVFDAKRLIGRKFGDPVVQSDMKHWPFQVINDGDKPKVQVSYKGETKAFYPEEISSMVLTKMKEIAEAYLGYPVTNAVITVPAYFNDSQRQATKDAGVIAGLNVLRIINEPTAAAIAYGLDRTGKGERNVLIFDLGGGTFDVSILTIDDGIFEVKATAGDTHLGGEDFDNRLVNHFVEEFKRKHKKDISQNKRAVRRLRTACERAKRTLSSSTQASLEIDSLFEGIDFYTSITRARFEELCSDLFRSTLEPVEKALRDAKLDKAQIHDLVLVGGSTRIPKVQKLLQDFFNGRDLNKSINPDEAVAYGAAVQAAILMGDKSENVQDLLLLDVAPLSLGLETAGGVMTALIKRNSTIPTKQTQIFTTYSDNQPGVLIQVYEGERAMTKDNNLLGRFELSGIPPAPRGVPQIEVTFDIDANGILNVTATDKSTGKANKITITNDKGRLSKEEIERMVQEAEKYKAEDEVQRERVSAKNALESYAFNMKSAVEDEGLKGKISEADKKKVLDKCQEVISWLDANTLAEKDEFEHKRKELEQVCNPIISGLYQGAGGPGPGGFGAQGPKGGSGSGPTIEEVD

SEQ ID NO: 9 - DNA, 2551 bp, Homo sapiens
ggaaaacggccagcctgaggagctgctgcgagggtccgcttcgtctttcgagagtgactcccgcggtcccaaggctttccagagcgaacctgtgcggctgcaggcaccggcgtgttgagtttccggcgttccgaaggactgagctcttgtcgcggatcccgtccgccgtttccagcccccagtctcagagcggagcccacagagcagggcaccggcatggccaaagccgcggcgatcggcatcgacctgggcaccacctactcctgcgtgggggtgttccaacacggcaaggtggagatcatcgccaacgaccagggcaaccgcaccacccccagctacgtggccttcacggacaccgagcggctcatcggggatgcggccaagaaccaggtggcgctgaacccgcagaacaccgtgtttgacgcgaagcggctgatcggccgcaagttcggcgacccggtggtgcagtcggacatgaagcactggcctttccaggtgatcaacgacggagacaagcccaaggtgcaggtgagctacaagggggagaccaaggcattctaccccgaggagatctcgtccatggtgctgaccaagatgaaggagatcgccgaggcgtacctgggctacccggtgaccaacgcggtgatcaccgtgccggcctacttcaacgactcgcagcgccaggccaccaaggatgcgggtgtgatcgcggggctcaacgtgctgcggatcatcaacgagcccacggccgccgccatcgcctacggcctggacagaacgggcaagggggagcgcaacgtgctcatctttgacctgggcgggggcaccttcgacgtgtccatcctgacgatcgacgacggcatcttcgaggtgaaggccacggccggggacacccacctgggtggggaggactttgacaacaggctggtgaaccacttcgtggaggagttcaagagaaaacacaagaaggacatcagccagaacaagcgagccgtgaggcggctgcgcaccgcctgcgagagggccaagaggaccctgtcgtccagcacccaggccagcctggagatcgactccctgtttgagggcatcgacttctacacgtccatcaccagggcgaggttcgaggagctgtgctccgacctgttccgaagcaccctggagcccgtggagaaggctctgcgcgacgccaagctggacaaggcccagattcacgacctggtcctggtcgggggctccacccgcatccccaaggtgcagaagctgctgcaggacttcttcaacgggcgcgacctgaacaagagcatcaaccccgacgaggctgtggcctacggggcggcggtgcaggcggccatcctgatgggggacaagtccgagaacgtgcaggacctgctgctgctggacgtggctcccctgtcgctggggctggagacggccggaggcgtgatgactgccctgatcaagcgcaactccaccatccccaccaagcagacgcagatcttcaccacctactccgacaaccaacccggggtgctgatccaggtgtacgagggcgagagggccatgacgaaagacaacaatctgttggggcgcttcgagctgagcggcatccctccggcccccaggggcgtgccccagatcgaggtgaccttcgacatcgatgccaacggcatcctgaacgtcacggccacggacaagagcaccggcaaggccaacaagatcaccatcaccaacgacaagggccgcctgagcaaggaggagatcgagcgcatggtgcaggaggcggagaagtacaaagcggaggacgaggtgcagcgcgagagggtgtcagccaagaacgccctggagtcctacgccttcaacatgaagagcgccgtggaggatgaggggctcaagggcaagatcagcgaggcggacaagaagaaggttctggacaagtgtcaagaggtcatctcgtggctggacgccaacaccttggccgagaaggacgagtttgagcacaagaggaaggagctggagcaggtgtgtaaccccatcatcagcggactgtaccagggtgccggtggtcccgggcctggcggcttcggggctcagggtcccaagggagggtctgggtcaggccctaccattgaggaggtggattaggggcctttgttctttagtatgtttgtctttgaggtggactgttgggactcaaggactttgctgctgttttcctatgtcatttctgcttcagctctttgctgcttcacttctttgtaaagttgtaacctgatggtaattagctggcttcattatttttgtagtacaaccgatatgttcattagaattctttgcatttaatgttgatactgtaagggtgtttcgttccctttaaatgaatcaacactgccaccttctgtacgagtttgtttgttttttttttttttttttttttttgcttggcgaaaacactacaaaggctgggaatgtatgtttttataatttgtttatttaaatatgaaaaataaaatgttaaactttaaaaaaaaaaaaaaaaaaaaaaaaaaaaaaa

SEQ ID NO: 10 - protein, 641 aa, Homo sapiens; identical to SEQ ID NO: 8

SEQ ID NO: 11 - DNA, 2371 bp, Homo sapiens
gacggggtggggggtggggggaccccggttgtgcagtttgatattgagggagcccccacctactcgctggggctgcgtaatctgtacgcttccaaactgaagcgaaggcgtcgggagactaggcctcagagaaccatggctactgccaagggaatcgccataggcatcgacctgggcaccacctactcctgtgtgggggtgttccagcacggcaaggtggagatcatcgccaacgaccagggcaaccgcaccacccccagctacgtggccttcacagacaccgagcggctcattggggatgcggccaagaaccaggtagcaatgaatccccagaacactgtttttgatgctaaacgtctgatcggcaggaaatttaatgatcctgttgtacaagcagatatgaaactttggccttttcaagtgattaatgaaggaggcaagcccaaagtccttgtgtcctacaaaggggagaataaagctttctaccctgaggaaatctcttcgatggtattgactaagttgaaggagactgctgaggcctttttgggccaccctgtcaccaatgcagtgattaccgtgccagcctatttcaatgactctcaacgtcaggctactaaggatgcaggtgtgattgctggacttaatgtgctaagaatcatcaatgagcccacggctgctgccattgcctatggtttagataaaggaggtcaaggagaacgacatgtcctgatttttgatctgggtggaggcacatttgatgtgtcaattctgaccatagatgatgggatttttgaggtaaaggccactgctggggacactcacctgggtggggaggactttgacaacaggcttgtgagccacttcgtggaggagttcaagaggaaacacaaaaaggacatcagccagaacaagcgagccgtgaggcggctgcgcaccgcctgcgagagggccaagaggaccctgtcgtccagcacccaggccaacctagaaattgattcactttatgaaggcattgacttctatacatccatcaccagagctcgatttgaagagttgtgtgcagacctgtttaggggtaccctggagcctgtagaaaaagcgcttcgggatgccaagatggataaggctaaaatccatgacattgttttagtagggggctccacccgcatccccaaggtgcagcggctgcttcaggactacttcaatggacgtgatctcaacaagagcatcaaccctgatgaggccgtagcatatggggctgcggtacaagcagccatcctgatgggggacaagtctgagaaggtacaggacctgctgctgctggacgtggctcccctgtccctggggctggagacggctgggggcgtgatgactgccctgataaagcgcaactccaccatccccaccaagcagacacagattttcaccacctactctgacaaccaacccggggtgctgatccaggtgtatgagggcgagagggccatgacaaaggacaacaacctgctggggcggtttgacctgactggaatccctccagcacccaggggagttcctcagatcgaggtgacgtttgacattgatgccaatggtattctcaatgtcacagccatggacaagagcaccggcaaggtgaacaagatcaccatcaccaatgacaagggccgcctgagcaaggaggagattgagcgcatggttctggatgctgagaaatataaagctgaagatgaggtccagagggagaaaattgctgcaaagaatgccttagaatcctatgcttttaacatgaagagtgttgtgagtgatgaaggtttgaagggcaagattagtgagtctgataaaaataaaatattggataaatgcaacgagctcctttcgtggctggaggtcaatcaactggcagagaaagatgagtttgatcataagagaaaggaattggagcagatgtgtaaccctatcatcacaaaactctaccaaggaggatgcactgggcctgcctgcggaacagggtatatgcctggaaggcctgccacaggccccacaattgaagaagtagattaattctttttagaactgaagcatcctaggatgcctctacatgtatttcattcccctcatcttcaaacatcattattattcttgaccagacctgaatctaagttaccatcccttggaaattctggagaaggagtctcatgcaccacctatcacactccctcacatcctgtttctgactttggaatggactcaggaaaactaggcccctctttaaaccgtgtgatgtatttgaatgtctgttatttccagccaccctaacattcttcttcctgtgtggatgcttatttgtcaatcagtaaatttgttcgtaaag

SEQ ID NO: 12 - protein, 641 aa, Homo sapiens [sequence omitted]

SEQ ID NO: 13 - DNA, 3457 bp, Homo sapiens
cctccacctcccgggttcaagcgattctcctgcctcagcctcccgagtagctgagactacaggcacgcgccaccacgcccagctaatttttgtatctttagtagagacgggctttcaccatgttggccaggatggtctcgatgtcttaacgtcgtgatccggccgcctcggcctcccaagtgctgggattacaggcgttagccactgcgcccggccccagccaggcagttttaatcgagcgctcacaaccactgagacgcagcgaagcacccaccataatatcccaggaggccgaccgccggttcagactttttcttttctttaatccccgtccaagggatccgccctcaccccccaccccagccaccccaattccctattccctccccttggacggcgccggggaaaacaagctgctcgagctttatttcttcggtgcaaccaactcagaatgaattcctccgcccctgcgtgctcagtgagtcggcaccctagcagtgaactgcatttaaaacctcaggaattgagcgaactctcccagtggctctcctcaccgggatccccttccacgcctcctccccgtgccgcgcctcagtccgcactgctcattggccgcgtgcctgccaatccgatgcacgtcggctagggcaaagaccgcgaaaaagcgcgtacacctggctctgggagcgcgcgcctaacgccagccagcagcaggaggcgcgcgaggcaccacggcctggcggccgagagtcagggaggaacctcatttacataacggccgcccctctgtctcctggcgggggccggagtcccgcccctcgtccaacttgaaatctgttgggtcacgggccagtcactccgacctaggcaagcctgtggtggagctggaagagtttgtgagggcggtcccgggagcggattgggtctgggagttcccagaggcggctataagaaccgggaactgggcgcggggagctgagttgctggtagtgcccgtggtgcttggttcgaggtggccgttagttgactccgcggagttcatctccctggttttcccgtcctaacgtcgctcgcctttcagtcaggatgtctgcccgtggcccggctatcggcatcgacctgggcaccacctattcgtgcgtcggggtcttccaacatggcaaggtggagatcatcgccaacgaccagggcaatcgcaccacccccagctacgtggccttcacggacaccgagcgcctcatcggcgacgccgccaagaaccaggtggccatgaaccccaccaacaccatcttcgacgccaagaggctgattggacggaaattcgaggatgccacagtgcagtcggatatgaaacactggccgttccgggtggtgagcgagggaggcaagcccaaagtgcaagtagagtacaagggggagaccaagaccttcttcccagaggagatatcctccatggtcctcacgaagatgaaggagatcgcggaagcctacctggggggcaaggtgcacagcgcggtcataacggtcccggcctatttcaacgactcgcagcgccaggccaccaaggacgcaggcaccatcacggggctcaatgtgctgcgcatcatcaacgagcccacggcggcggccatcgcctacggcctggacaagaagggctgcgcgggcggcgagaagaacgtgctcatctttgacctgggcggtggcactttcgacgtgtccatcctgaccatcgaggatggcatcttcgaggtgaagtccacggccggcgatacccacctgggcggtgaggacttcgacaaccgcatggtgagccacctggcggaggagttcaagcgcaagcacaagaaggacattgggcccaacaagcgcgccgtgaggcggctgcgcaccgcttgcgagcgcgccaagcgcaccctgagctcgtccacgcaggcgagcatcgagatcgactcgctctacgagggcgtggacttctatacgtccatcacgcgcgcccgcttcgaggagctcaatgccgacctctttcgcgggaccctggagccggtggagaaggcgctgcgcgacgccaagctggacaagggccagatccaggagatcgtgctggtgggcggctccactcgtatccccaagatccagaagctgctgcaggatttcttcaacggcaaggagctgaacaagagcatcaaccccgacgaggcggtggcctatggcgccgcggtgcaggcggccatcctcatcggcgacaaatcagagaatgtgcaggacctgctgctactcgacgtgaccccgttgtcgctgggcatcgagacagctggcggtgtcatgaccccactcatcaagaggaacaccacgatccccaccaagcagacgcagaccttcaccacctactcggacaaccagagcagcgtactggtgcaggtatacgagggcgaacgggccatgaccaaggacaataacctgctgggcaagttcgacctgaccgggattccccctgcgcctcgcggggtcccccaaatcgaggttaccttcgacattgacgccaatggcatccttaacgttaccgccgccgacaagagcaccggtaaggaaaacaaaatcaccatcaccaatgacaaaggtcgtctgagcaaggacgacattgaccggatggtgcaggaggcggagcggtacaaatcggaagatgaggcgaatcgcgaccgagtcgcggccaaaaacgccctggagtcctatacctacaacatcaagcagacggtggaagacgagaaactgaggggcaagattagcgagcaggacaaaaacaagatcctcgacaagtgtcaggaggtgatcaactggctcgaccgaaaccagatggcagagaaagatgagtatgaacacaagcagaaagagctcgaaagagtttgcaaccccatcatcagcaaactttaccaaggtggtcctggcggcggcagcggcggcggcggttcaggagcctccgggggacccaccatcgaagaagtggactaagcttgcactcaagtcagcgtaaacctctttgcctttctctctctctcttttttttttgtttgtttctttgaaatgtccttgtgccaagtacgagatctattgttggaagtctttggtatatgcaaatgaaaggagaggtgcaacaacttagtttaattataaaagttccaaagtttgttttttaaaaacattattcgaggtttctctttaatgcattttgcgtgtttgctgacttgagcatttttgattagttcgtgcatggagatttgtttgagatgagaaaccttaagtttgcacacctgttctgtagaagcttggaaacagtaaaatatataggagcttaaattgtttatttttatgtactactttaaaactaaactgaacattgcagtaatgttaaggacaggtatactttttgcaaacaaatgcataaatgcaaatgtaaagtaaa

SEQ ID NO: 14 - protein, 639 aa, Homo sapiens
MSARGPAIGIDLGTTYSCVGVFQHGKVEIIANDQGNRTTPSYVAFTDTERLIGDAAKNQVAMNPTNTIFDAKRLIGRKFEDATVQSDMKHWPFRVVSEGGKPKVQVEYKGETKTFFPEEISSMVLTKMKEIAEAYLGGKVHSAVITVPAYFNDSQRQATKDAGTITGLNVLRIINEPTAAAIAYGLDKKGCAGGEKNVLIFDLGGGTFDVSILTIEDGIFEVKSTAGDTHLGGEDFDNRMVSHLAEEFKRKHKKDIGPNKRAVRRLRTACERAKRTLSSSTQASIEIDSLYEGVDFYTSITRARFEELNADLFRGTLEPVEKALRDAKLDKGQIQEIVLVGGSTRIPKIQKLLQDFFNGKELNKSINPDEAVAYGAAVQAAILIGDKSENVQDLLLLDVTPLSLGIETAGGVMTPLIKRNTTIPTKQTQTFTTYSDNQSSVLVQVYEGERAMTKDNNLLGKFDLTGIPPAPRGVPQIEVTFDIDANGILNVTAADKSTGKENKITITNDKGRLSKDDIDRMVQEAERYKSEDEANRDRVAAKNALESYTYNIKQTVEDEKLRGKISEQDKNKILDKCQEVINWLDRNQMAEKDEYEHKQKELERVCNPIISKLYQGGPGGGSGGGGSGASGGPTIEEVD

SEQ ID NO: 15 - DNA, 3385 bp, Homo sapiens
gctctggtgctgcggctccgctctcgtcgcaacgagatctttcgagatcttctccgcccccgctaccggcgcctcctctgcggccactgagccggagccggcctgagcagcgctctcggttgcagtacccactggaaggacttaggcgctcgcgtggacaccgcaagcccctcagtagcctcggcccaagaggcctgctttccactcgctagccccgccgggggtccgtgtcctgtctcggtggccggacccgggcccgagcccgagcagtagccggcgccatgtcggtggtgggcatagacctgggcttccagagctgctacgtcgctgtggcccgcgccggcggcatcgagactatcgctaatgagtatagcgaccgctgcacgccggcttgcatttcttttggtcctaagaatcgttcaattggagcagcagctaaaagccaggtaatttctaatgcaaagaacacagtccaaggatttaaaagattccatggccgagcattctctgatccatttgtggaggcagaaaaatctaaccttgcatatgatattgtgcagttgcctacaggattaacaggtataaaggtgacatatatggaggaagagcgaaattttaccactgagcaagtgactgccatgcttttgtccaaactgaaggagacagccgaaagtgttcttaagaagcctgtagttgactgtgttgtttcggttccttgtttctatactgatgcagaaagacgatcagtgatggatgcaacacagattgctggtcttaattgcttgcgattaatgaatgaaaccactgcagttgctcttgcatatggaatctataagcaggatcttcctgccttagaagagaaaccaagaaatgtagtttttgtagacatgggccactctgcttatcaagtttctgtatgtgcatttaatagaggaaaactgaaagttctggccactgcatttgacacgacattgggaggtagaaaatttgatgaagtgttagtaaatcacttctgtgaagaatttgggaagaaatacaagctagacattaagtccaaaatccgtgcattattacgactctctcaggagtgtgagaaactcaagaaattgatgagtgcaaatgcttcagatctccctttgagcattgaatgttttatgaatgatgttgatgtatctggaactatgaatagaggcaaatttctggagatgtgcaatgatctcttagctagagtggagccaccacttcgtagtgttttggaacaaaccaagttaaagaaagaagatatttatgcagtggagatagttggtggtgctacacgaatccctgcggtaaaagagaagatcagcaaatttttcggtaaagaacttagtacaacattaaatgctgatgaagctgtcactcgaggctgtgcattgcagtgtgccatcttatcgcctgctttcaaagtcagagaattttctatcactgatgtagtaccatatccaatatctctgagatggaattctccagctgaagaagggtcaagtgactgtgaagtcttttccaaaaatcatgctgctcctttctctaaagttcttacattttatagaaaggaacctttcactcttgaggcctactacagctctcctcaggatttgccctatccagatcctgctatagctcagttttcagttcagaaagtcactcctcagtctgatggctccagttcaaaagtgaaagtcaaagttcgagtaaatgtccatggcattttcagtgtgtccagtgcatctttagtggaggttcacaagtctgaggaaaatgaggagccaatggaaacagatcagaatgcaaaggaggaagagaagatgcaagtggaccaggaggaaccacatgttgaagagcaacagcagcagacaccagcagaaaataaggcagagtctgaagaaatggagacctctcaagctggatccaaggataaaaagatggaccaaccaccccaagccaagaaggcaaaagtgaagaccagtactgtggacctgccaatcgagaatcagctattatggcagatagacagagagatgctcaacttgtacattgaaaatgagggtaagatgatcatgcaggataaactggagaaggagcggaatgatgctaagaacgcagtggaggaatatgtgtatgaaatgagagacaagcttagtggtgaatatgagaagtttgtgagtgaagatgatcgtaacagttttactttgaaactggaagatactgaaaattggttgtatgaggatggagaagaccagccaaagcaagtttatgttgataagttggctgaattaaaaaatctaggtcaacctattaagatacgtttccaggaatctgaagaacgaccaaaattatttgaagaactagggaaacagatccaacagtatatgaaaataatcagctctttcaaaaacaaggaggaccagtatgatcatttggatgctgctgacatgacaaaggtagaaaaaagcacaaatgaagcaatggagtggatgaataacaagctaaatctgcagaacaagcagagtttgaccatggatccagttgtcaagtcaaaagagattgaagctaaaattaaggagctgacaagtacttgtagccctataatttcaaagcccaaacccaaagtggaacctccaaaagaggaacaaaaaaatgcagagcagaatggaccagtggatggacaaggagacaacccaggcccccaggctgctgagcagggtacagacacagctgtgccttcggattcagacaagaagcttcctgaaatggacattgattgattccaacacttgtttctattaaaacagactattataaagctttaagttgtcaactttgttctaaatatcaactagcgcaagtgaatactgaagatttcttagtcagtttttaggggattttcggggaggggaaataggtaatgtatggagcattttcacttctaaatagttagatacagaaattaagtgcattgtatctttttcataatggtactatttagaagcccagttagtcttactgagcttatgcttcactcctttatgtttaaccatgtgtctacaagaataagtttgttttggaaagttgagctatagctacagctctagctatccagcagacttttcattatgacttacatggcaggagctctaattatgctttaaaaatctgttgtggagattgctttaaatgctccctgcctggtgtggggatggggtccccctctttgtgagggctggagcatggcacggcatggattaacacggcagaggaacaaaggtgtgctctgagcttcttcatatttcaccttcaccctcacctgtgttctcttccctctctcccaataaaagggctcccatta

SEQ ID NO: 16 - protein, 840 aa, Homo sapiens
MSVVGIDLGFQSCYVAVARAGGIETIANEYSDRCTPACISFGPKNRSIGAAAKSQVISNAKNTVQGFKRFHGRAFSDPFVEAEKSNLAYDIVQLPTGLTGIKVTYMEEERNFTTEQVTAMLLSKLKETAESVLKKPVVDCVVSVPCFYTDAERRSVMDATQIAGLNCLRLMNETTAVALAYGIYKQDLPALEEKPRNVVFVDMGHSAYQVSVCAFNRGKLKVLATAFDTTLGGRKFDEVLVNHFCEEFGKKYKLDIKSKIRALLRLSQECEKLKKLMSANASDLPLSIECFMNDVDVSGTMNRGKFLEMCNDLLARVEPPLRSVLEQTKLKKEDIYAVEIVGGATRIPAVKEKISKFFGKELSTTLNADEAVTRGCALQCAILSPAFKVREFSITDVVPYPISLRWNSPAEEGSSDCEVFSKNHAAPFSKVLTFYRKEPFTLEAYYSSPQDLPYPDPAIAQFSVQKVTPQSDGSSSKVKVKVRVNVHGIFSVSSASLVEVHKSEENEEPMETDQNAKEEEKMQVDQEEPHVEEQQQQTPAENKAESEEMETSQAGSKDKKMDQPPQAKKAKVKTSTVDLPIENQLLWQIDREMLNLYIENEGKMIMQDKLEKERNDAKNAVEEYVYEMRDKLSGEYEKFVSEDDRNSFTLKLEDTENWLYEDGEDQPKQVYVDKLAELKNLGQPIKIRFQESEERPKLFEELGKQIQQYMKIISSFKNKEDQYDHLDAADMTKVEKSTNEAMEWMNNKLNLQNKQSLTMDPVVKSKEIEAKIKELTSTCSPIISKPKPKVEPPKEEQKNAEQNGPVDGQGDNPGPQAAEQGTDTAVPSDSDKKLPEMDID

SEQ ID NO: 17 - DNA, 3284 bp, Homo sapiens
gccggttggaggcggccgaaccgcagtagggaaagacccaggctgcgggacgcggtgcaggctgcggcgctgacggcctctgctccttccgcgggtttccgactccctgccctagattttctgcttagcgacttggggtcccctctcgtttgcttctggtaggagtcgcaatcccagcagcaatagcccagaagaggacacggttcccgtaccgaagggttcagtaccagcagcccgaccatcacgcggcgggatgtctgtggttggcattgacctcggctttctcaactgctacattgctgtcgcgagaagtggcggcatcgagaccatcgccaatgagtacagcgacaggtgtaccccggcctgtatatcattgggatcaagaactcgagccattggaaatgcagcaaagagccagatagtcacgaacgtaagaaatacaattcatggcttcaaaaagcttcatgggcgatcatttgatgatcccattgtgcaaactgaaaggatcaggcttccctatgaactgcagaaaatgcctaatggaagtgcaggagttaaggtgcggtacttagaggaagagagaccttttgcaattgagcaagttactggaatgctgttagccaagcttaaagagacttcagaaaatgctttgaagaaaccagtggctgactgtgtgatttcaattcctagcttttttactgatgccgagagaagatctgtgatggctgcagcccaggttgcaggcttaaattgtttaaggttgatgaatgaaactactgcagttgcactggcgtatggaatttataaacaggatcttcccccattagatgagaaaccaagaaatgtagtatttattgatatgggacattctgcctatcaggtcttggtttgtgcttttaacaaaggaaaacttaaagtcttggctactacctttgatccatatttgggtggcaggaactttgatgaggctttagtagactacttctgtgatgagttcaagaccaaatataagataaatgtgaaagaaaactctcgggccttgttgcgtttatatcaggaatgtgaaaaactaaagaagctaatgagtgcaaatgcatcagatcttccattgaacattgagtgtttcatgaatgaccttgatgtttctagtaaaatgaacagggctcaatttgaacaactgtgtgcttcccttttggccagggttgaaccacctttaaaagcagtaatggaacaagctaacttacaacgtgaagacattagtagtatagaaattgtaggaggagcaacacgaattcctgcagtgaaagaacaaatcactaaattctttcttaaagacataagtaccacattaaatgctgatgaagctgttgcaagaggatgtgcgttacagtgtgcgattctctcaccagcatttaaagtgcgtgaattttccataacagaccttgttccctattcaatcacattaaggtggaagacctcttttgaagatggaagtggggaatgtgaagttttctgtaagaaccatcctgccccattctcaaaagtcattactttccacaagaaggaaccatttgaactagaagcattttatactaatttacatgaagtgccttatcctgatgcaagaattgggagcttcactattcagaatgtttttccacagtctgatggtgatagttccaaagtgaaggttaaagttcgtgttaacatccatggaatcttcagtgtggctagcgcatcagtaattgagaagcaaaatttggaaggcgatcacagtgatgctccaatggagacagaaacttcatttaaaaatgaaaacaaagataatatggataaaatgcaggttgatcaagaagaagggcatcaaaaatgtcatgctgaacacactccagaagaggaaattgatcatacaggagccaaaacaaagtcagctgtctcagacaaacaagaccgattaaatcagacacttaaaaaaggaaaagtcaaaagtattgatctaccgatccagagtagcctatgtagacaactaggccaagatcttctcaacagctacattgaaaatgaggggaagatgatcatgcaagataagttagagaaagaaagaaatgatgctaagaatgccgttgaagaatatgtatatgattttagagacaggctgggcactgtctatgaaaaattcatcactccagaagacttgagtaaactgtctgcagtattggaagacacagaaaattggctttatgaagacggagaggaccaacctaaacaagtttatgtggataagcttcaagaactaaagaaatacggccagcctattcaaatgaagtacatggagcatgaagagagaccaaaagccttaaatgacttgggaaaaaagatccaacttgtcatgaaagtgatagaagcttatagaaacaaggatgaaagatatgatcatctggatcctactgaaatggaaaaggttgaaaaatgtatcagtgatgccatgagttggctgaatagtaagatgaatgcacagaacaaactaagtctcactcaagatcctgtggtaaaagtttcagaaatagtagcaaagtcaaaggaactggataatttctgtaaccccatcatttacaagcccaaaccaaaagcagaagttcctgaagacaaaccaaaagctaatagtgaacacaatggcccaatggatggacagagtggaactgaaactaaatcagattcaacaaaagacagctcacagcatactaaatcctctggagagatggaagtggactaagtcttaattttaccttcacattaattcaaaccgtgcaagtaaccacggggtccatcttttacatctggtacacacaacagacgctcagttgttcttaaccacttttgtcatttgttttttggagtagttttgaaaagtgttttatattgagtgcacttctgttcatttccattgctgcttatatgcagtgttagccgaattagatttacaagacaatctaagctttccggataattttatatatcaaacatacaggatggatacatagttggcaacagtctaccttatttaaagcttctactgggataaacctcaattcctttattcaggaaaggatactttattgcattattgttgcagaagcatagatttaattgcatctttattttgaaaaacaaatgaaaattgatggggtttaaagctacagaggcactgacctttttctagttattgtattgctacaatttaaatattaaaacaaataagagctttcccaaaaaaaaaaaaaaaa

SEQ ID NO: 18 - protein, 839 aa, Homo sapiens
MSVVGIDLGFLNCYIAVARSGGIETIANEYSDRCTPACISLGSRTRAIGNAAKSQIVTNVRNTIHGFKKLHGRSFDDPIVQTERIRLPYELQKMPNGSAGVKVRYLEEERPFAIEQVTGMLLAKLKETSENALKKPVADCVISIPSFFTDAERRSVMAAAQVAGLNCLRLMNETTAVALAYGIYKQDLPPLDEKPRNVVFIDMGHSAYQVLVCAFNKGKLKVLATTFDPYLGGRNFDEALVDYFCDEFKTKYKINVKENSRALLRLYQECEKLKKLMSANASDLPLNIECFMNDLDVSSKMNRAQFEQLCASLLARVEPPLKAVMEQANLQREDISSIEIVGGATRIPAVKEQITKFFLKDISTTLNADEAVARGCALQCAILSPAFKVREFSITDLVPYSITLRWKTSFEDGSGECEVFCKNHPAPFSKVITFHKKEPFELEAFYTNLHEVPYPDARIGSFTIQNVFPQSDGDSSKVKVKVRVNIHGIFSVASASVIEKQNLEGDHSDAPMETETSFKNENKDNMDKMQVDQEEGHQKCHAEHTPEEEIDHTGAKTKSAVSDKQDRLNQTLKKGKVKSIDLPIQSSLCRQLGQDLLNSYIENEGKMIMQDKLEKERNDAKNAVEEYVYDFRDRLGTVYEKFITPEDLSKLSAVLEDTENWLYEDGEDQPKQVYVDKLQELKKYGQPIQMKYMEHEERPKALNDLGKKIQLVMKVIEAYRNKDERYDHLDPTEMEKVEKCISDAMSWLNSKMNAQNKLSLTQDPVVKVSEIVAKSKELDNFCNPIIYKPKPKAEVPEDKPKANSEHNGPMDGQSGTETKSDSTKDSSQHTKSSGEMEVD

SEQ ID NO: 19 - DNA, 2664 bp, Homo sapiens
agagccagcccggaggagctagaaccttccccgcatttctttcagcagcctgagtcagaggcgggctggcctggcgtagccgcccagcctcgcggctcatgccccgatctgcccgaaccttctcccggggtcagcgccgcgccgcgccacccggctgagtcagcccgggcgggcgagaggctctcaactgggcgggaaggtgcgggaaggtgcggaaaggttcgcgaaagttcgcggcggcgggggtcgggtgaggcgcaaaaggataaaaagcccgtggaagcggagctgagcagatccgagccgggctggctgcagagaaaccgcagggagagcctcactgctgagcgcccctcgacggcggagcggcagcagcctccgtggcctccagcatccgacaagaagcttcagccatgcaggccccacgggagctcgcggtgggcatcgacctgggcaccacctactcgtgcgtgggcgtgtttcagcagggccgcgtggagatcctggccaacgaccagggcaaccgcaccacgcccagctacgtggccttcaccgacaccgagcggctggtcggggacgcggccaagagccaggcggccctgaacccccacaacaccgtgttcgatgccaagcggctgatcgggcgcaagttcgcggacaccacggtgcagtcggacatgaagcactggcccttccgggtggtgagcgagggcggcaagcccaaggtgcgcgtatgctaccgcggggaggacaagacgttctaccccgaggagatctcgtccatggtgctgagcaagatgaaggagacggccgaggcgtacctgggccagcccgtgaagcacgcagtgatcaccgtgcccgcctatttcaatgactcgcagcgccaggccaccaaggacgcgggggccatcgcggggctcaacgtgttgcggatcatcaatgagcccacggcagctgccatcgcctatgggctggaccggcggggcgcgggagagcgcaacgtgctcatttttgacctgggtgggggcaccttcgatgtgtcggttctctccattgacgctggtgtctttgaggtgaaagccactgctggagatacccacctgggaggagaggacttcgacaaccggctcgtgaaccacttcatggaagaattccggcggaagcatgggaaggacctgagcgggaacaagcgtgccctgcgcaggctgcgcacagcctgtgagcgcgccaagcgcaccctgtcctccagcacccaggccaccctggagatagactccctgttcgagggcgtggacttctacacgtccatcactcgtgcccgctttgaggaactgtgctcagacctcttccgcagcaccctggagccggtggagaaggccctgcgggatgccaagctggacaaggcccagattcatgacgtcgtcctggtggggggctccactcgcatccccaaggtgcagaagttgctgcaggacttcttcaacggcaaggagctgaacaagagcatcaaccctgatgaggctgtggcctatggggctgctgtgcaggcggccgtgttgatgggggacaaatgtgagaaagtgcaggatctcctgctgctggatgtggctcccctgtctctggggctggagacagcaggtggggtgatgaccacgctgatccagaggaacgccactatccccaccaagcagacccagactttcaccacctactcggacaaccagcctggggtcttcatccaggtgtatgagggtgagagggccatgaccaaggacaacaacctgctggggcgttttgaactcagtggcatccctcctgccccacgtggagtcccccagatagaggtgacctttgacattgatgctaatggcatcctgagcgtgacagccactgacaggagcacaggtaaggctaacaagatcaccatcaccaatgacaagggccggctgagcaaggaggaggtggagaggatggttcatgaagccgagcagtacaaggctgaggatgaggcccagagggacagagtggctgccaaaaactcgctggaggcccatgtcttccatgtgaaaggttctttgcaagaggaaagccttagggacaagattcccgaagaggacaggcgcaaaatgcaagacaagtgtcgggaagtccttgcctggctggagcacaaccagctggcagagaaggaggagtatgagcatcagaagagggagctggagcaaatctgtcgccccatcttctccaggctctatggggggcctggtgtccctgggggcagcagttgtggcactcaagcccgccagggggaccccagcaccggccccatcattgaggaggttgattgaatggcccttcgtgataagtcagctgtgactgtcagggctatgctatgggccttctagactgtcttctatgatcctgcccttcagagatgaactttccctccaaagctagaactttcttcccaggataactgaagtcttttgactttttggggggagggcggttcatcctcttctgcttcaaataaaaagtcattaatttattaaaacttgtgtggcactttaacattgctttcacctatattttgtgtactttgttacttgcatgtatgaattttgttatgtaaaatatagttatagacctaaataaaaaaaaaaaaaa

SEQ ID NO: 20 - protein, 643 aa, Homo sapiens
MQAPRELAVGIDLGTTYSCVGVFQQGRVEILANDQGNRTTPSYVAFTDTERLVGDAAKSQAALNPHNTVFDAKRLIGRKFADTTVQSDMKHWPFRVVSEGGKPKVRVCYRGEDKTFYPEEISSMVLSKMKETAEAYLGQPVKHAVITVPAYFNDSQRQATKDAGAIAGLNVLRIINEPTAAAIAYGLDRRGAGERNVLIFDLGGGTFDVSVLSIDAGVFEVKATAGDTHLGGEDFDNRLVNHFMEEFRRKHGKDLSGNKRALRRLRTACERAKRTLSSSTQATLEIDSLFEGVDFYTSITRARFEELCSDLFRSTLEPVEKALRDAKLDKAQIHDVVLVGGSTRIPKVQKLLQDFFNGKELNKSINPDEAVAYGAAVQAAVLMGDKCEKVQDLLLLDVAPLSLGLETAGGVMTTLIQRNATIPTKQTQTFTTYSDNQPGVFIQVYEGERAMTKDNNLLGRFELSGIPPAPRGVPQIEVTFDIDANGILSVTATDRSTGKANKITITNDKGRLSKEEVERMVHEAEQYKAEDEAQRDRVAAKNSLEAHVFHVKGSLQEESLRDKIPEEDRRKMQDKCREVLAWLEHNQLAEKEEYEHQKRELEQICRPIFSRLYGGPGVPGGSSCGTQARQGDPSTGPIIEEVD

SEQ ID NO: 21 - DNA, 2493 bp, Homo sapiens
cccgggcgggcgggcgggaggctctcgactgggcgggaaggtgcgggaaggttcgcggcggcggggtcggggaggtgcaaaaggatgaaaagcccgtggaagcggagctgagcagatccgagccgggctggcggcagagaaaccgcagggagagcctcactgctgagcgcccctcgacggcggagcggcagcagcctccgtggcctccagcatccgacaagaagcttcagccatgcaggccccacgggagctcgcggtgggcatcgacctgggcaccacctactcgtgcgtgggcgtgtttcagcagggccgcgtggagatcctggccaacgaccagggcaaccgcaccacgcccagctacgtggccttcaccgacaccgagcggctggtcggggacgcggccaagagccaggcggccctgaacccccacaacaccgtgttcgatgccaagcggctgatcgggcgcaagttcgcggacaccacggtgcagtcggacatgaagcactggcccttccaggtggtgagcgagggcggcaagcccaaggtgcgcgtatgctaccgcggggaggacaagacgttctaccccgaggagatctcgtccatggtgctgagcaagatgaaggagacggccgaggcgtacctgggccagcccgtgaagcacgcagtgatcaccgtgcccacctatttcagtaactcgcagcgccaggccaccaaggacgcgggggccatcgcggggctcaaggtgctgccgatcatcaatgaggccacggcagcagccatcgcctatgggctggaccggcggggcgcgggaaagcgcaacgtgctcatttttgacctgggtgggggcaccttcgatgtgtcggttctctccattgacgccggtgtctttgaggtgaaagccactgctggagatacccacctgggaggagaggacttcgacaaccggctcgtgaaccacttcatggaagaattccggcggaagcatgggaaggacctgagcgggaacaagcgtgccctgcgcaggctgcgcacagcctgtgagcgcgccaagcgcaccccgtcctccagcacccaggccaccctggagatagactccctgttcgagggcgtggacttctacaagtccatcactcgtgcccgctttgaggaactgtgctcagacctcttccgcagcaccctggagccggtggagaaggccctgcgggatgccaagctggacaaggcccagattcatgacttcgtcctggggggagggctccactcgcatccccaaggtgcagaagttgctgcaggacttcttcaacggcaaggagctgaacaagagcatcaaccctgatgaggctgtggcctatgggtctgctgtgcaggcggccgtgttgatgggggacaaatgtgagaaagtgcaggatctcctgctgctggatgtggctcccctgtctctggggctggagacagcaggtggggtgatgaccacgctgatccagaggaacgccactatccccaccaagcagacccagactttcaccacctactcggacaaccagcctggggtcttcatccaggtgtatgaggttgagagggccatgaccaaggacaacaacctgctggggcgttttgaactcattggcatccctcctgccccacatggagtcccccagatagaggtgacgtttgacattgatgctaatggcatcctgagcgtgacagccactgacaggagcacaggtaaggctaacaagatcaccaatgacaagggccggctgagcaaggaggaggtggagaggatggttcatgaagccgagcagtacggggctgaggatgaggcccagagggacagagtggctgccaaaaactcgctggaggcccatgtcttccatgtgaaaggttctttgcaagaggaaagccttagggacaagattcccgaagaggacaggcgcaaagtgcaagacaagtgtcaggaagtccttgcctggctggagcacaaccagctggcagagaaggaggagtatgagcatcagaagagggagctggagcaaatctgtcgccccatcttctccaggctctatggggggcctggtgtccctgggggcagcagttgtagcgctcaagcccaccagggggaccccagcaccggccccatcattgaggaggttgattgaatggcccttcgtgataagtcagctgtgactgtcagggctatgctatgggccttctagactgtcttctatgatcctgcccttcagagatgaagggcttgggggggtcttccctccaaagctagaactttctttccaggataactgaagtcttttgactttttggggggagggcggttcatcctcttctgcttcaaataaaaagtcattaatttattaaaacttgtgtggcactttaacattgctttcacctatattttgtgtattttgttacttgtatgtatgaattttgttatgtaaaatatagttatagacctaaataaacttttaaaactcc

SEQ ID NO: 22 - protein, 367 aa, Homo sapiens
MQAPRELAVGIDLGTTYSCVGVFQQGRVEILANDQGNRTTPSYVAFTDTERLVGDAAKSQAALNPHNTVFDAKRLIGRKFADTTVQSDMKHWPFQVVSEGGKPKVRVCYRGEDKTFYPEEISSMVLSKMKETAEAYLGQPVKHAVITVPTYFSNSQRQATKDAGAIAGLKVLPIINEATAAAIAYGLDRRGAGKRNVLIFDLGGGTFDVSVLSIDAGVFEVKATAGDTHLGGEDFDNRLVNHFMEEFRRKHGKDLSGNKRALRRLRTACERAKRTPSSSTQATLEIDSLFEGVDFYKSITRARFEELCSDLFRSTLEPVEKALRDAKLDKAQIHDFVLGGGLHSHPQGAEVAAGLLQRQGAEQEHQP

SEQ ID NO: 23 - DNA, 3506 bp, Homo sapiens
ttcctcccctggactctttctgagctcagagccgccgcagccgggacaggagggcaggctttctccaaccatcatgctgcggagcatattacctgtacgccctggctccgggagcggcagtcgagtatcctctggtcaggcggcgcgggcggcgcctcagcggaagagcgggcctctgggccgcagtgaccaacccccgcccctcaccccacgtggttggaggtttccagaagcgctgccgccaccgcatcgcgcagctctttgccgtcggagcgcttgtttgctgcctcgtactcctccatttatccgccatgataagtgccagccgagctgcagcagcccgtctcgtgggcgccgcagcctcccggggccctacggccgcccgccaccaggatagctggaatggccttagtcatgaggcttttagacttgtttcaaggcgggattatgcatcagaagcaatcaagggagcagttgttggtattgatttgggtactaccaactcctgcgtggcagttatggaaggtaaacaagcaaaggtgctggagaatgccgaaggtgccagaaccaccccttcagttgtggcctttacagcagatggtgagcgacttgttggaatgccggccaagcgacaggctgtcaccaacccaaacaatacattttatgctaccaagcgtctcattggccggcgatatgatgatcctgaagtacagaaagacattaaaaatgttccctttaaaattgtccgtgcctccaatggtgatgcctgggttgaggctcatgggaaattgtattctccgagtcagattggagcatttgtgttgatgaagatgaaagagactgcagaaaattacttggggcacacagcaaaaaatgctgtgatcacagtcccagcttatttcaatgactcgcagagacaggccactaaagatgctggccagatatctggactgaatgtgcttcgggtgattaatgagcccacagctgctgctcttgcctatggtctagacaaatcagaagacaaagtcattgctgtatatgatttaggtggtggaacttttgatatttctatcctggaaattcagaaaggagtatttgaggtgaaatccacaaatggggataccttcttaggtggggaagactttgaccaggccttgctacggcacattgtgaaggagttcaagagagagacaggggttgatttgactaaagacaacatggcacttcagagggtacgggaagctgctgaaaaggctaaatgtgaactctcctcatctgtgcagactgacatcaatttgccctatcttacaatggattcttctggacccaagcatttgaatatgaagttgacccgtgctcaatttgaagggattgtcactgatctaatcagaaggactatcgctccatgccaaaaagctatgcaagatgcagaagtcagcaagagtgacataggagaagtgattcttgtgggtggcatgactaggatgcccaaggttcagcagactgtacaggatctttttggcagagccccaagtaaagctgtcaatcctgatgaggctgtggccattggagctgccattcagggaggtgtgttggccggcgatgtcacggatgtgctgctccttgatgtcactcccctgtctctgggtattgaaactctaggaggtgtctttaccaaacttattaataggaataccactattccaaccaagaagagccaggtattctctactgccgctgatggtcaaacgcaagtggaaattaaagtgtgtcagggtgaaagagagatggctggagacaacaaactccttggacagtttactttgattggaattccaccagcccctcgtggagttcctcagattgaagttacatttgacattgatgccaatgggatagtacatgtttctgctaaagataaaggcacaggacgtgagcagcagattgtaatccagtcttctggtggattaagcaaagatgatattgaaaatatggttaaaaatgcagagaaatatgctgaagaagaccggcgaaagaaggaacgagttgaagcagttaatatggctgaaggaatcattcacgacacagaaaccaagatggaagaattcaaggaccaattacctgctgatgagtgcaacaagctgaaagaagagatttccaaaatgagggagctcctggctagaaaagacagcgaaacaggagaaaatattagacaggcagcatcctctcttcagcaggcatcactgaagctgttcgaaatggcatacaaaaagatggcatctgagcgagaaggctctggaagttctggcactggggaacaaaaggaagatcaaaaggaggaaaaacagtaataatagcagaaattttgaagccagaaggacaacatatgaagcttaggagtgaagagacttcctgagcagaaatgggcgaacttcagtctttttactgtgtttttgcagtattctatatataatttccttaatttgtaaatttagtgaccattagctagtgatcatttaatggacagtgattctaacagtataaagttcacaatattctatgtccctagcctgtcatttttcagctgcatgtaaaaggaggtaggatgaattgatcattataaagatttaactattttatgctgaagtgaccatattttcaaggggtgaaaccatctcgcacacagcaatgaaggtagtcatccatagacttgaaatgagaccacatatggggatgagatccttctagttagcctagtactgctgtactggcctgtatgtacatggggtccttcaactgaggccttgcaagtcaagctggctgtgccatgtttgtagatggggcagaggaatctagaacaatgggaaacttagctatttatattaggtacagctattaaaacaaggtaggaatgaggctagacctttaacttccctaaggcatacttttctagctaccttctgccctgtgtctggcacctacatccttgatgattgttctcttacccattctggaatttttttttttttaaataaatacagaaagcatcttgatctcttgtttgtgaggggtgatgccctgagatttagcttcaagaatatgccatggctcatgcttcccatatttcccaaagagggaaatacaggatttgctaacactggttaaaaatgcaaattcaagatttggaagggctgttataatgaaataatgagcagtatcagcatgtgcaaatcttgtttgaaggattttattttctccccttagacctttggtacatttagaatcttgaaagtttctagatctctaacatgaaagtttctagatctctaacatgaaagtttttagatctctaacatgaaaaccaaggtggctattttcaggttgctttcagctccaagtagaaataaccagaattggcttacattaaagaaactgcatctagaaataagtcctaagatactatttctatggctcaaaaataaaaggaacccagatttctttcccta

SEQ ID NO: 24 - protein, 679 aa, Homo sapiens
MISASRAAAARLVGAAASRGPTAARHQDSWNGLSHEAFRLVSRRDYASEAIKGAVVGIDLGTTNSCVAVMEGKQAKVLENAEGARTTPSVVAFTADGERLVGMPAKRQAVTNPNNTFYATKRLIGRRYDDPEVQKDIKNVPFKIVRASNGDAWVEAHGKLYSPSQIGAFVLMKMKETAENYLGHTAKNAVITVPAYFNDSQRQATKDAGQISGLNVLRVINEPTAAALAYGLDKSEDKVIAVYDLGGGTFDISILEIQKGVFEVKSTNGDTFLGGEDFDQALLRHIVKEFKRETGVDLTKDNMALQRVREAAEKAKCELSSSVQTDINLPYLTMDSSGPKHLNMKLTRAQFEGIVTDLIRRTIAPCQKAMQDAEVSKSDIGEVILVGGMTRMPKVQQTVQDLFGRAPSKAVNPDEAVAIGAAIQGGVLAGDVTDVLLLDVTPLSLGIETLGGVFTKLINRNTTIPTKKSQVFSTAADGQTQVEIKVCQGEREMAGDNKLLGQFTLIGIPPAPRGVPQIEVTFDIDANGIVHVSAKDKGTGREQQIVIQSSGGLSKDDIENMVKNAEKYAEEDRRKKERVEAVNMAEGIIHDTETKMEEFKDQLPADECNKLKEEISKMRELLARKDSETGENIRQAASSLQQASLKLFEMAYKKMASEREGSGSSGTGEQKEDQKEEKQ

SEQ ID NO: 25 - DNA, 5739 bp, Homo sapiens
ggcggctcagacacggcccgagcgccgccgcggacgcggacagagacccgcacgggcacgggcgctgcgctggaggctcccctcgcggtccggggctgcgcgaccatggcggacaaggaggccggcggcagcgacgggccccgagaaacggctcccacatctgcatattcatctccagcccggagtcttggggacacaggaataacgcctctgtccccctcccatattgtgaacgacactgactccaacgtctcagaacagcagtcatttctcgtggtggtggccgtcgactttgggaccacatccagtggctatgcctacagcttcaccaaggagccggaatgcatccatgtgatgaggcgatgggagggaggtgaccctggtgtgtccaatcagaagactccaaccaccatcttgctgactcccgagaggaagttccacagcttcgggtatgccgccagggacttttaccatgacctggatcccaatgaggccaagcagtggctgtacctggagaagttcaagatgaagctgcacaccactggggacctcaccatggatacagacctgacggcagcaaatggcaagaaagtcaaagcccttgaaatctttgcttatgccctgcagtactttaaggagcaggcgctgaaggagctgagtgaccaggcgggttcggagttcgagaactctgatgtcagatgggtcatcacggtgcctgccatctggaagcagccggccaagcagttcatgagacaagctgcctaccaggcaggcctggcctcccccgagaactcggagcagctcatcattgccttggagcctgaggcagcctctatctactgccgaaagctgcggctacaccagatgattgagctgagcagcaaggcagccgtcaatgggtacagcggcagtgacacagtaggagctgggtttacacaggctaaggaacacatacggcgtaatcggcagagtcggacctttttggtggagaatgtcataggagaaatctggtccgagctggaggaaggtgataagtatgtggttgtggacagtggcggtggcaccgtagacctgacagtccatcagatccggttaccggagggacaccttaaggaactgtataaagcaacaggcggaccctatggatctttaggagtagattatgagttcgaaaaacttctgtataaaatatttggagaggattttattgaacaattcaaaatcaaacgccctgcagcctgggttgacttaatgattgcgtttgagtctcgcaaaagggcggctgccccagacagaactaacccgctgaacatcaccctgcccttctccttcattgactactacaagaagttccgcgggcacagtgtggagcacgccttgcggaaaagcaatgtggattttgtgaagtggtcctcgcaggggatgctgcggatgagtccagatgccatgaacgccctttttaagccgaccatcgatagcatcattgagcatctccgggacctgtttcagaagcccgaggtgtccaccgtcaagttcctctttctggtgggcggctttgccgaggcgcccctgctgcagcaggcggtgcaggctgcttttggggaccagtgccggatcatcatcccccaggacgtgggcctcaccatcctcaagggtgccgtcctctttggcctggaccccgcggtcatcaaggtgcgccggtcgccgctcacctacggggtaggcgtgctgaaccgctacgtggagggcaagcacccgcctgagaagctgctggtgaaggatggcactcggtggtgcaccgacgtctttgacaagttcatctctgccgaccagtctgtggctctgggtgagctggtcaagcgtagctacaccccggccaagccctcccagctggtcattgtcatcaacatctacagctctgagcacgacaacgtcagcttcatcactgatcccggggtgaagaagtgtggcacgctccgcctggatctcacagggaccagtggcactgcggtgcccgcccggagggagatccagacccttatgcagttcggggacaccgagatcaaagccacagccattgatatagccacttcgaagagtgtcaaagttgggatcgacttcttaaattactaaccctcccgccccgctgcctgtccccttggactcaacttatctgcatctgctgacctcaaccttgactgttctttccctaaccttgaccctcaccattgcccatgtgaatttcagcagggaagatgagaacaatcagggctagaaataattagtgacttttgagggcacactggagtcagaaaaacagaaattaagattaaggtttaggcatagaaaattaaaggatcctggaggagcagctagttttcataggtacaaaagtggtgaaatggccacggagaagggaatcagtacatttctgcagcagtggttgcgctgctttgaacagatctccgttatgtagaatttaggatgccctattgctgtctttctagatttaaaatgagatctttgaaccaggaggagatcttcatctgagacttgtctttctaaattttttggatggccatcaatataaaatgccacccatctgcagttaatttcttttcctcatcatgtgattaaaagtggtgattcagtgggaactgggaatgtttttagctggtggtagaaggctgcctacactgggcactgttttagattctcatatcatttaaacagcaaggaggttcagggaagaataaccgtagccttgggtaatccactagggcttttgtgagtaggagagctgatacctcacattcttagcaggtgaaaacttgccatgatggaaacagatagtgaagagttactgacgtatcccaaattatatgctgtgacataaattcccagcatgcccagccctgatttctgagttcataagtaattctagtgaaccttagtaggaattctgggtaagaaaatgaggttgccattggtcttgtttgcatcaccaagaccagacatccagaagagcccctcaccttgaaaagcagacagattttaaattaaccccctccttcccactcaccttcatctccctaagagttttggccatttaattccacattttgaaaggaatacattggtgaaatttgggaagagaatctgtgctatgcaatgtttcattaaaatcttcagtttttcaagtctctctaaaaataatttgtagatctatacttgatgtattaagtcagttttttttcacagcgggcctgtggctcgcctgcatcagaattgcctgggtgcgtgttcagaacaggttcctggatctgagccctttttaactgaggccgactcttggagaggggcaccagaatctgcatttgtagtgtataccacatcgtggttcaactgaaattggagaaatactaacctgagattttgttgaagttcacacacagatcacagcccgccctctgcaggtgtcccctttgggctcctttaggaagagggcttccatgagaaggtgaccccataccttgccctcttggtcaatgggattggggctccacctggcttggagatggcccttttaaccctcacaggaagggccaggggaggaaaaaaattgcaagaaagcgacaccaagaacggagctgactgaggaaccaactggagggtcttcactctctccttccccagtgtacaaaaccagttttctgcaacattcaggagccaaatgaggaaaaagaatcaagaatctgactcacagcccatctgatctgttcaaagctgtcttttccacctgctgaaattcattaaatcactggaggcatgcataatgaatggagaatgagtgaacttccaatgcaacttggattcacaaacccattatcatagccaatatgcagattttaaacagcatttcacatttcatttgaccatgtcttctttttcgcatcgcctgctgcagaattccctactagaatgtgaaacaacgaacaaaccacagaacttagagtgtgctggttagtcacataacttagtagcaggattgtgtatccaggcacaaaggtgtctttgctaatgttctcttgctacctgccctgcttcaaacgctaaatggtatgggtctttctttgttgccagccatattctacaaataagacttttcaatatagttatgagtaatataattttatgtacatataatgttagaatattgtacagaatcttggtttctacgatgcgcttttcttgtttcaaaaagaggaaaatgcttgatttttgttgatgatacttttgttactgtccttaattttccatagtttggtttcttaattgtgctcactaagcatcgatctgtgctgatgccaagctatggactatgtacgcaagaccgagcaatagacagaggtgcctagggtccaaacacactgaacgcacgtggaccgcctggatcaggagcctcatcagacccttctccatgcacatccttcccaaacagtcacagattccattgaaaggagcagattctatcagttcttctgtgcagactttaagagctgaacgttctggttctggaagccatgtgactgcgcagaacaacctaagaaaccctttgtgtcctgaggggtcgttgacctctccttccgggtcggagcagtcactctgagggcaaagcgtggtccactgtgtgtgatgttttcaggatgctagggtcaaagaaagaaaccaagtggtacataagcccagcttttctgctgggctaagtgtaagtgtgagtaacatggtcaagcccctcttttttgggctaatgtaaagcctttcctgccttgcattaatgctatctccctgtgtactgtttctcttaaatgagcagatagaaatctgcagtgttggcagataggtgatggagaggatgataattttatcttctggccacagagctgcagccccagttgtcagagtccttaaatgaaacccccaaatccatccctccttccctacccccactggaatattctagaataagagcactggataagtacacttgaacacatttttctaaccttagaaaatacctacaaggcctgttgtcttgacccattactcaattgtccctggcatattatctgatcttcacgtttcttggaagcagaatcatcaaggctttcctttgtaactgccctttccgtacacagcaggcatgaataaatgctgagtaacagacaagttacagacaggaggggaaagaggaggaaccatacaactgtttttgcaaaatgatggctgagtccagattatagaggttgccttacccttagaatgttatttagaccaagtttagcttttagagtccaggtctggttaattgccagggtagcaaagaatcgcatgcaccaatgtaaacaggagtcagaatgcattattagtcaaagatcgaatttcacattgtagagatgtatagctgtgattaagctgcatatgtatgctgggaaacggcttgagtggatggctaatataaaagttgttggccataatgccacacctctcatctgcttgaaatatggaccagtattctaaaatatcagctactggggtctcattcactacaagataaattcaaacttcacagaactttgcagcagttcaccaccagacgggactgtgtctgcaaactctcttgtcttcacagacgcctaataaagcaaaactctgaatctcaaaaaaaaaaaaaaaaaa

SEQ ID NO: 26 - protein, 675 aa, Homo sapiens
MADKEAGGSDGPRETAPTSAYSSPARSLGDTGITPLSPSHIVNDTDSNVSEQQSFLVVVAVDFGTTSSGYAYSFTKEPECIHVMRRWEGGDPGVSNQKTPTTILLTPERKFHSFGYAARDFYHDLDPNEAKQWLYLEKFKMKLHTTGDLTMDTDLTAANGKKVKALEIFAYALQYFKEQALKELSDQAGSEFENSDVRWVITVPAIWKQPAKQFMRQAAYQAGLASPENSEQLIIALEPEAASIYCRKLRLHQMIELSSKAAVNGYSGSDTVGAGFTQAKEHIRRNRQSRTFLVENVIGEIWSELEEGDKYVVVDSGGGTVDLTVHQIRLPEGHLKELYKATGGPYGSLGVDYEFEKLLYKIFGEDFIEQFKIKRPAAWVDLMIAFESRKRAAAPDRTNPLNITLPFSFIDYYKKFRGHSVEHALRKSNVDFVKWSSQGMLRMSPDAMNALFKPTIDSIIEHLRDLFQKPEVSTVKFLFLVGGFAEAPLLQQAVQAAFGDQCRIIIPQDVGLTILKGAVLFGLDPAVIKVRRSPLTYGVGVLNRYVEGKHPPEKLLVKDGTRWCTDVFDKFISADQSVALGELVKRSYTPAKPSQLVIVINIYSSEHDNVSFITDPGVKKCGTLRLDLTGTSGTAVPARREIQTLMQFGDTEIKATAIDIATSKSVKVGIDFLNY

SEQ ID NO: 27 - DNA, 1810 bp, Homo sapiens
gggaggctgtagcggccgaccggacgcagggggctggcgggaacgtgaagctccgcggtgcctgatggggccgttgggcggccggtagctgttgctgttgggggaccccctcattcctgccgctgccgtccctgctgcctcatggcggccatcggagttcacctgggctgcacctcagcctgtgtggccgtctataaggatggccgggctggtgtggttgcaaatgatgccggtgaccgagttactccagctgttgttgcttactcagaaaatgaagagattgttggattggcagcaaaacaaagtagaataagaaatatttcaaatacagtaatgaaagtaaagcagatcctgggcagaagctccagtgatccacaagctcagaaatacatcgcggaaagtaaatgtttagtcattgaaaaaaatgggaaattacgatatgaaatagatactggagaagaaacaaaatttgttaacccagaagatgttgccagactgatatttagtaaaatgaaagaaacggcacattctgtattgggctcagatgcaaatgatgtagttattactgtcccgtttgattttggagaaaagcaaaaaaatgctcttggagaagcagctagagctgctggatttaatgttttgcgattaattcacgaaccgtctgcagctcttcttgcttatggaattggacaagactcccctactggaaaaagcaatattttggtgtttaagcttggaggaacatccttatctctcagcgtcatggaagttaacagtggaatatatcgggttctttcaacaaacactgatgataacatcggtggtgcacatttcacagaaaccttagcacagtatctagcttctgagttccaaagatccttcaaacatgatgtgagaggaaatgcgcgagccatgatgaaattaacgaacagtgctgaagtagcgaaacattctttgtcaaccttgggaagtgccaactgttttcttgactcattatatgaaggtcaagattttgattgcaatgtgtccagagcaagatttgaacttctttgttctccactttttaataagtgtatagaagcaatcagaggactcttagatcaaaatggatttacagcagatgatatcaacaaggttgtcctttgtggagggtcttctcgaatcccaaagctacagcaactgattaaagatcttttcccagctgttgagcttctcaattctatccctcctgatgaagtgatccctattggtgcagctatagaagcaggaattcttattgggaaagaaaacctgttggtggaagactctcttatgatagagtgttcagccagagatattttagttaagggtgtggacgaatcaggagccagtagattcacagtgctgtttccatcagggactcctttgccagctcgaagacaacacacattgcaagcccctggaagcatatcttcagtgtgccttgaactctatgagtctgatgggaagaactctgccaaagaggaaaccaagtttgcacaggttgtactccaggatttagataaaaaagaaaatggattacgtgatatattagctgttcttactatgaaaagggatggatctttacatgtgacatgcacagatcaagaaactggaaaatgtgaagcaatctctattgagatagcatcttagtgttttagagaaatcaagaatttttaaaaacaagaatatcaacatttggttttgtgtataagtggtgtttgtattaaaatactttttcaatgaactgtataaactatgttttattaaactacaatatatcagtaaaaaa

SEQ ID NO: 28 - protein, 509 aa, Homo sapiens
MAAIGVHLGCTSACVAVYKDGRAGVVANDAGDRVTPAVVAYSENEEIVGLAAKQSRIRNISNTVMKVKQILGRSSSDPQAQKYIAESKCLVIEKNGKLRYEIDTGEETKFVNPEDVARLIFSKMKETAHSVLGSDANDVVITVPFDFGEKQKNALGEAARAAGFNVLRLIHEPSAALLAYGIGQDSPTGKSNILVFKLGGTSLSLSVMEVNSGIYRVLSTNTDDNIGGAHFTETLAQYLASEFQRSFKHDVRGNARAMMKLTNSAEVAKHSLSTLGSANCFLDSLYEGQDFDCNVSRARFELLCSPLFNKCIEAIRGLLDQNGFTADDINKVVLCGGSSRIPKLQQLIKDLFPAVELLNSIPPDEVIPIGAAIEAGILIGKENLLVEDSLMIECSARDILVKGVDESGASRFTVLFPSGTPLPARRQHTLQAPGSISSVCLELYESDGKNSAKEETKFAQVVLQDLDKKENGLRDILAVLTMKRDGSLHVTCTDQETGKCEAISIEIAS

SEQ ID NO: 29 - DNA, 22 bp, Artificial Sequence
  Primer
ttacgagagaaaactcatgggc

SEQ ID NO: 30 - DNA, 22 bp, Artificial Sequence
  Primer
gggtccaacttgtccagaatgc

SEQ ID NO: 31 - DNA, 18 bp, Artificial Sequence
  Primer
accacagtccatgccatc

SEQ ID NO: 32 - DNA, 17 bp, Artificial Sequence
  Primer
tccaccacctgttgctg

SEQ ID NO: 33 - DNA, 19 bp, Rattus norvegicus
actgcgcgagatagaaaga

SEQ ID NO: 34 - DNA, 19 bp, Rattus norvegicus
gttgcctcttcagattctg

SEQ ID NO: 35 - DNA, 19 bp, Rattus norvegicus
gagagccaaactaatgtgg

SEQ ID NO: 36 - DNA, 19 bp, Rattus norvegicus
ctgaggtcttcaaaggtat

SEQ ID NO: 37 - DNA, 33497 bp, Homo sapiens
attaattgcttgccatcatgagcagaagcaagcgtgacaacaatttttatagtgtagagattggagattctacattcacagtcctgaaacgatatcagaatttaaaacctataggctcaggagctcaaggaatagtatggtaagtgtttacttccaaaaattaggcaaagaatcattaactgctaccttttctcctctcgtaatttagataccttggcaaatatttaacttgctttgaaaaattaaattaaaactaaaaattaaacgaaaactattccacagtaaattgtttgcttcaggatcaatggtcttttctttattattattattaaaggttgagtatcccttatctgaaatgcttaggaccagaagtgtcagattttggaatatttgcattggttgagcattccaaattcaaatcagaaatacttcagtgaacatttcctttgagcatcatgtcagtgcccccaaaatttagattctcgagcattttagatttcatattttcagatttgggataataacctgtattattcataagatacaactctataaactagcactgccatctttaagtataaactatgattaaatacttgggcatagccattgaagacaaatatctctatcagcaaagaataagtggcatgcttgttaatttcatgtatacatgtattcccatagataattgtttaataagaagcttcacttagtcatcactttcacactataatgaagcgtggaatttcagaaatcttattctatactggggaatgaagtcagctaatatctcactgtgtgtgtttcaaaattcatccatatgtttaaaattgatttattagctaatttctacaaaagcctcaggctatatcagcataattctttataaactgaaatgcagatcactctttgggatagttctgatactgattgcagatcactaaattagcataataataaactagtgttttggggaattataagcctcactcaagaataattatatttttattacctcttcttgaaacaaatttcagaatctattctaaacaaaatgtaaactgttaagtatttataatccagtatttctcctaggttctaaaaaaactgttttacatgtgcacagggagtcatgcataggattggtgtttgcagcaccatttataacagcaaaaattggaaatagcatcaaatctatcaacagaagaataaaaaattgtgatacagtcatgctgtgaaatactatataacattttaaacgaactggagccatatgtgtcaacaaggataacctcagaaatgtagtgctgggcttcaaagcaagatgtagaatatatatatacatcattataccatttacatgtagcttaaaatatgcaaagcagtaccatatatttatggattatatatatgtacaaaagattaaaacatgcataaataccaaacttaggatgttgtttatctctgagaaaatagagaaaagaaaggaggtttgacctataatattatatttctttctaaaaaattcagagcaagccgggcgcggtggctcacgcctataatccccgcactttgggaggccgaggtgggtggatcatgaggtcaggagttcaagaccagcctggccaacatggtgaaaccctgtctgtactcaaaatacaaaaattagctgggcatggtggcacatgcctgtaatcccagctacttgggaggcggaggcaggagaatagcttgaacccgggaggtggaggttgtggtgagctgagatggtgtcactgcactccagcctgggtgatagagtgagactccgtctaaaaaaaaaaaaaaaatcagagcaattatggtaacgtattaagatttaataaatttgcataatagaatggcatttattatctttcctgcattcttgaagtaatttacaatatcaaaaattatagaagttggagtcattttgtaagccgttttgactggcctgttctcattgtaaccaaccacatttaaccaaccataaattaaatttaaagaaaatcatattatatagtcagtattaggattctgaaagccagctctctgttcagattttgttttttgttttttgtttttttgtttttttgtttttttttgagacagagtctcactctgtcgcccaggctagagtgcagtggcgtgatcttggctcactgcaagctccgcctcccgggttcacgccattctcccgcctcagcctccggagtagctggggctacaggtgcctgccaccacgcccggctaatttgtgtgtgtgtgtgtgtgtgtgtgtgtgtgtgtgtgtgtgtatttttagtagagacagggtttcaccatgttagccgggatggtctcgatctcctgatctcgtgatctacccgcctcggcctcccaaagtgctgggattacaggcgtgagccactgcgcctggcccttctgtatttattttattgtgtccaaaaggatagaagtaatgtgtttacatagaattattcagcaaatcttttgagtagaatttatatgctttttttttttttgagggagtctaccaggctggagtgcggtggtgcgatcttggctcactgcaacttccgcctcccaggttcaagtgattcccttgccttagcctctcaagtagctgggactacaggtgtgcaccatcacacccagctaatttttttgtattttagtagaggcggagtttcactgtgttggccaggatggtctcgatctcctgacctcatgatccacccaccttgacctcccaaagtgctgggattacaggcgtgagccactgcacccagcctcgtatgcattctttatcctaccttttcttgatggaagtacaaggttaaggatttatttaggctttaggctatctagtggagctaaataattatggatttgtacattgagtgcccacgatgtactaggtggatctttgaggcaacacaacgaacatgcagggtctctgttggcatagtccactgtctatttggatccattagcattttaggaaatagttgcaaaaaaatatatgttgtaatagatatagaagacacatgttgagcgtcatagacttggaagggatccagttacttgtctttggagaaagtgagaaatgtatatgactgtttcatgaattcagtttacagatttttgcttgaagtttttttgtgtgtttttgaatttcttattacagcgcagcttatgatgccattcttgaaagaaatgttgcaatcaagaagctaagccgaccatttcagaatcagactcatgccaagcgggcctacagagagctagttcttatgaaatgtgttaatcacaaaaatgtaagtgaacatttttggtttcctaagtatagatgaaatcaagatttattcatgaatatgtgaatatcaaagactaaatattaggggctttaaattgttctgtattaaaacattgtttaaaagggatatatatatatatatatatatctacagggtgattttcctcaactttattaaattgtatcagaagaatggcttctaaaatttagattatatgatttcctgtcatttaatttacaaaaggagttttaaaaagataagcgtttgagaagaattttattcagcttgatctcatcttctgctttttgttctccgtcaggctgacatttagaaaactgtagcattagcacagagatgaaattgttcccattatgctttgacactctgactttaatcatattgaatataaaatttatatcacttctccctaccccactcccacctctttaagtgatggcagtattcactgatcactttatgatgaggatagtgggtttagcagaaagtgtttgaaactatctagagggtattaacatgtttctaattctattttctaatgattgcaaagataagtctttataaagatatataagttgcactcattttgagaataaacagttatacttttttaaacttacattaagcttattcatacttttgtgattgttctaatggaatgatttcttcagttgaggaaataaactaggagtgaattgtgtaagggacacttttaggcagtcctaaaccgaaggcatctgactaaagacatttcgtagtgtttgtccaaaagagtttatataatataatgagcacagtaccttctgactacagataatacaatttaccacattttgagatctaaatatgtgcaggcctctgtgtattggagttactgggttcattatcaagggaaaaaaaaatcatggaagttcaggattaggccctttatttggggagcttacaatggtgttttgaatacaaaacagacatacagagagttaaatatcaaacatcacaaagcagtggccgtttgtcaaatgatgatggtggcccatatattgaaatctaaaaagagggacgatttctgtgagctttaattaactgggaaggctttggggaggagtagacctaggctgactcttaaagatggggtaaaaattggattgttgaaggaaaggagccttcagagaggaagaatgacgtaaaaaaggtccagagacaaagattaaacttagataataatagggaggaagttgtggtagccattcttgttccaagcgggaacttgatgtgttgctcatcacagttttgctggtggcatcctgtccatggatagagctgctcgtgccccttgtggcctgtgaacgcagttccatggcagtggtggtgttgccttagtttttccttggggaggagttcagttaatcctacctctcaagcctgggtgactgcaaagaaaggtggttccttcaactgcatggagtatgactaagcatgtctcacatgattaggcctctagcaggggtggcagaggtttatccaggcagaactctcagcacctagaagagtgtggacaagagtaggtactcagaatatatttgttcagtgagtgagtataaagctaaatatgggaaaactggaaatggtaactgaattattccactcacccatggatggatgtttttgtagtgttttgccttttaaacaatttcatcctctgtacagattgtctcttcactggtctaagcatctctggtttttctcattcttttcatagatggtcttgagtttcttttttaatcttggccgtttatctctgaacacactttgaaagtgacctagcacacactactgcataagccacctagcacacagtactgcacgtctgatcaaatcctctgagaggagctgaggcatgtcatctcttaactgtagacattaaaaccctgtttagaaatttcgtccccatctgactcccgttgtctttctttgttacaggcctgccttacagttcccatctcacccagtctttatattttttcttttgattatggagaattaagtatagtacttcatgtttctccctattaaatttcaaaggtgaaatgtggttgctcttcctggtctactagtgattgctgtgattgcttttttcttccttgttctgacttttcacttgtgggcttcacttcccagttttgctcaggatatctttgtaatagctggattaattcattagcaacttttgagcatattgcagaaattacgtgtctaactatcacagttatccagctgtttccaattcatcatcttattcacatggatgttattattagaaacattttgtaaaatgccattttgaaatcttcatatactgtgtctggttgcatttttctgatttattgctattgttctttgttgtttttattcatggaaggaaatagtatttctcaatgaacttttacctgctcttggtaattgttacttcttttgaagtagttatataccactactaatcattgacttttgcttggctgtccagtctataactgatataatttcctttatttccctttttgaaaaatgggacaactatctgtttgaatctcttttataacagctttattgaaatataatttctgtgtcatgcaattcacccatttgaagtataccattcagtggtttttagtatattcagtgatatgtgggaccatcactacagtcagttctagaataattttatcacctcaggataaaagaaagaaatcttttatcctttagctgtcattcccctacctcccatccttctcagttctaaacaaccactaatcaatcttctttctgtctctatatgcctttaatatttaatacctctcttctactctagggcttcccagatattaatgagaatagatttagtatttgtccaagtctcctattgtgcattgcatgcggttggtagacttgaacttatttagagcagccagatgctttcttattatcatttccctctcttaaatttgtttggccctttctggtgtattatttttccgaatttattcactgaacaaatatttaaataccttatgtaaagctgaatgcttaaaagaaaaacatcaattctgcccttataaagtttatgcctaaaaaacaaattcccatccccaagtatcatcgtcagcaaacatttttatatgtgtgtcatgtaacttgccatatactaggcagtaaaagtgattaagacacagttgtttctaataaggattctctgtggtagggatgaggctgatgtgaaaatgagactagattacagtgtgctgaataccataacaacattagaagataactggggacaaagtagagagaatagtcaactctgtcaagaactaggagttgtcagaatctacaaaagaggttcacctggaagataattaagttgagtagataaatgacaagcatagggaatagtatgtttaaaagcatcaaaacattttaaaaatgacattcttaaaactagcatagctaaagtatgaagtgtaatataggacttagcaggagatgaagtgagttgatggcatatcatggaggcttttgaatatactgcaagggagtttcagaatatatttgttggctttaaatttttgaggaggtaagtaatatgatcaggtctttcttttaccatattataggcagtaaatggtagctggatttgtagaaaaccatcgttagtgacccttaatcagctcaggccaccataacaaaatactgtacactgggtgtcttaaacaacagagatttatttctcacaattctgtaggctgggaagttcaagatcaagttgctggtcaatttgattcttgatgagggcctgcttcctgacttggaggtggccaacttttcaccttgtcctcatttgcctttcttcagtgtgtgctcaaggagagggagagaaaaattgctcttttcgtcttcccttgttttaggccactaattccattatgagcgccccactctcatgacctaatctaacccttattaccttccaaaggccccatttccaaatactatcacattgggtgctaggagttaaacatatgaattgtgtggggtgtgtgtgtgagggacaatcaatctgtaacactagtgttagaaggaattacagcatgaacagtctagatgttagtcttcaagctgtttatagcacagggaatggaaaaaagagattgaaggtcagattgacagtagaatggacagcattctatgagtatttattatggtgcatatactgaaaaaggagttaaaaatcaccctgagccttcttttgtaaaagagagggcacactggaaaagtaaggggtttgggtaggaatgaaaatgaattcagtgttaccttattttgtgagatgtccatgcaaaaagtgaaaagaaatgggttaaacacaatagtgtgagaagggatatgcttatggatgaaccagtgaaatagactgggaatgaagaaaactgggcaagtgcagtattatgaaaaaccaagggaggaaagggctgagattatatagagatactgaattggaaaagaactggtagaagggatttaagatttgctgataaattatgtagaggtttgtataatgtaagtgcttgataattgactgttcataaatggaattacagataaatgggttacagatactctgtgcctccacctatccatcccctcctccaactcctgcccataaagttgcaatatataaaatgaaagcaattaacttgagcttagaatgtaaagaaagattttaaactgatggtagttttttttaactcatgtatttgtagttcccaaattaaaatattatgaagtaatttctaatttttctgtctctcgacttttattatagataattggccttttgaatgttttcacaccacagaaatccctagaagaatttcaagatgtgtaagtgtaataattaaaattttgttaagttagtacatttttcttagattgctgctggacactttagctgttctcttttttcactcataaagttacatagtcatggagctcatggatgcaaatctttgccaagtgattcagatggagctagatcatgaaagaatgtcctaccttctctatcagatgctgtgtggaatcaagcaccttcattctgctggaattattcatcgggttagtagaagaaactatcgtcatactctttgttttctcattgaggtgaaattcatgtaacaaaattaaccattctaaagtggcatttttagtacattcacagtgctgtacaactaccacccatattaaattctaaaatattttcattacccccaaaaaagtctccatgtttcttaagcagttgtgcatctttgccctggcatgataccagtctgctttctgtgtctatagatttgcctttatgtttccatttatatgaaatacggcgtgatgttttcaagatttctccatgtttaccgtgtatcaatagttcattcctttttatgactgaataatattctatataccatatttcgttcatccattcatccatcgatggacatttgggttatttctacctttcagctattatggatcgtgctatgaaaattcaagcacaaatatttgtttgaatatatattttcagtcctttaggatatacctgtgactggaagtgctgagtcatatggtgattctatagttaactttctgaggaaccatcaaactgcacagtgactgcactattttacattcccactagcagtgtatgcgggttccagtttcttcacatccttgtcagtacttgttatctgactttttaaattctagccatcctaatgggtacgaagtggtgtttcttgtgattttactttgcatctccctaacgactaataatgttgggcatttttcatgtgcttgtggccatttgtgtatcttctttggagaaatgtgtattcaagccctttgctcatttttaaattgggttgtttgtctttttgttgttgttttagcatttctttatgtatttcatacatgaaacctttatcaggtatataatttgtaaatattttctcccattctgtaggttgtctgttcactttgctgatgatttcctttaatgcacaaaaactataattttaatgaaatacaattgtttatttcatcacttgtgcttttggtatcatgtataagaatccattgtcaaacccatggtcatgaagatttagtcttatgggctcttctaagagttttatagtttaagtctcacatgtaggtctttgatctattttgagttaattttttgtctggtatgaggtaaggttccaacttcattcttttgtatgtggcaatttagttgtgccagcaccatttgttagagactactcttaacccattgaatggtcttggcacccctgtcaaaaaacagttggtcatagatacatggtttcatttttggactctcagttctgtttcacatagctcctatgtgcctgaccatgtattatactagtaccacattattttgatcacttttagcttcgtagtaacttgaaatggagaagtatcaattctccagctttattcttttacaatattgttttagcttttcagagccctttgtgatgccatatgaatttgagtatcattctatttctgcagaaagggcaattagaattctaattagtatttcattgcatctgtagattgcttaggtagttttgccatcgtaacaatatttagtcttccaattcacaaacataggatgtcttaccatttccttccttctcttcttttttcttttctttcttttctctccttccctcccttcccccctcccttccccttccttcctttctccaccctctcctctcttcccctcccctcccctcccctcccatttgtcttgtcttgtcttctccattctcagctcactgcaacctctacctcctgggttcaaacaattctcctgccgcagcctcccaagtagctgggattacaggggcctgcccccacgcctggttaatattttgtatttttagtagagacagagtttcaccatgttggtcaggctggtctcgaacccctgacctcaagtgatctgcccgccttggcctcccagagtgctgggattacaggcgtgaaccaccccacctggcctctttcagcactttagatgtatcatccattgctatttgttttgccatggcttccagtgataaatcagctgttaagctcattgaggatcttttataagtgacaaatgcacctctcttgctgctctcaagatgcctttttgtctttcgctttcaacagtttgattatgtgtcttagtgcagatctctttatgtttatccatcttagtattcattcagcagcttggatatgtagattcatgtcttttttgatcaggatggaaggaagctaaaaagaaaaaatagattcatatcttttatcaaatttagcaaattttcagtcattattttcttaaatattttttctgctcatttttctctttcttctccttttggaactcccattatgcaaagttgatatgcttaatggtatgccatgtcttgttttctcctccactttaatgttttgtcccaggcagcattgggctatttacttgccttaaccatgttttcaaggaatgcctctgtctaaccttggaccagggtcccacactgaaaatgtggctgctttcttcaaaatcctttgctagttagggaggcaggtagagccaaagactagttaaaatgctggaaatatttcccaatgttttttccccacctttttattgtagtaaatacatataaaatgtgccattttaaccattaaatctacagttctgtggcattaaatacattcataatgtgcaaccatcaccaccatccatctccagaattcttttcatcttgtgaagatgcaactctccacccaccagacagtaattccctattctcctctccccgcaacccccgacagacatcattctattttatgtctatatgattttggctactataaatacctcatataagcggaatcatgcagtatttgcctccttgcaactggcttatttcacttagcataatgtgctcaaggtttatccatgttgtagcatatgtcagaattttcttccttttcaaggctgaataatattccatttatgtatataccatacttgcttatccattcatcagtcagtggcaattgggttggttccacatttagctcttttgaaaaatgctgctatgaacatggttgtccaaatatctctttgagaccctacttttcagttcatttgggctacagccagaagtggaattgccggatcacatggtcattctttttaacattttgagaaactgccacactgttttccatagcagctgtaccattttacattcccaccagtagtgcagaagggtttcagttattcctcattcttaccaacacttttatttttttcatagtaaccatcctaaagggtgtgaggtggtttcctgtttttaagttgccattttcttggttctgagttcacttgattgccgtaaacctttgaataatttccagaattctgaaaaagtttattctgacactttgatgttttatggtgcttctgtggagctattttggctgacatcactgcctctcatcaaattcttagtatcactgtatttcactgatttatatggagcaatgtaaagtttgtttttgctctgaagtgaagcagtatacaaaataaactgctgttattaccagtcattccaaattgggaattgaatattaccaagttaccaaaattgagtatttgccagaattgttatatatatatatatatatatatatatatatatatatatatatattcagaaatattttatatttttgttctctgggatttttacctgcttttttgctatataatttacatgccatacaatttattcatttaacgtgtaccactcagtgtttattatatttgaagattgtatgctcgttaccacaatcttaactttagaaaattctattgccctaaaagaaactccacatccactcatctttatttcccattcttctgtgttcctttcacctctagccctaagcaaacactaatctactttctgtctttgtatatttgtctattctggacatttcatgtacatagaattatataatatgtgatattttgtgcttggcttattttacctagcataatcttttcaaggttcattcatgtatttattgtgtgtcagttcttcttgtcattttattgacaaatatttcactgtatagatatattgtttatccatttatcacttgattataatttgggttgttaccactgactattacaggtaatgctgacatgaacatttatgtaaaatttttttgtgtgttggtatgttttgtattttagttaaatctagcttattctttgaaaagtattgagaggatttttttttttttttttcctgagagacagaatcttcctctgtcactcaggccaggatgcagtggcgtaatcatagttcacttgcagccttgaactcctgggttcaataggttgaaaagaattttttttttttttttttttttttttgagacagggtctctgtctgtcacccaggcatgagtgcagtagcatgaacatggcttactgcagcctttacctcctgggctcagtgatcatcccacttcagcctcccaagtagctaagactatggacatgtaccaccatgcctggcaaatttttattttttatttttttgtagagacggggtcttgccatattgcccaggctggtcttgtattcctggcttcaagcaatccagctgccttgacctcccaaagtgctgggatcacaggcatgagccatcatgcccagcctggaatttttaaaaattatttaattcagtggaattacatcttccttctgagtcatctgcgtcaaataaccttactcatgtaataaaataaatacagagagagttttcacagtataagacaattatgtcttagggctattggggctttttttttaagtgaacaatcctgctacaggcttatccttaattatcattgtaagtgaattccttgtatattacatatacagctgctctaatcatttgtctaatgcaatctttaaataacataataaaaatctctttaaatgggagagtattttatcttcctgagcccctactcatacagtatgtgaagtagagcagacgagtgaaacttctaggtttgggttgtttgtttcctgagtccttagaccggggcagtaatccaacattgtggaagttcatttgattttagtaaagcacacccctccaaatagaaaggttccagattaatgaggatagcaggtggctggaccagaaaaacagaccaaatggtagaagatagaaaacaatggaaacaacaagaaccacaaaaaacaaacacaaaattacaaaagagcaatatttatggtaatatgttaatcggattagttccttaatttaaaaaggtcagattttggcagcacacaaggctcaacaacaactgcgtatttccataacacaaacattcgtagctaacttcaaaaggctgaaggcagagaggttggcagacatataccaggaaaatgcaaacattaaaacaagggtaactctatttaatgagataaagttgaatatggtggggtcagagaggaagtgttcctctctgagaataaagagtctcgcgttttcaaggtgaaagatactatccaattaggatacacaattatacatgaagtagggttgctatacaaaaagcttaaactgtagaaaatagaagaatggcacaagcacagttgtattgggatattctaacttactcccttagtatcagtacataaagtggtaaaaatgaagtacatctgtagaaaatttcttaatgtgataaagtggagctaatgagatctactggggtctgttatctattatgaagaatctccctttatcttggcttgggctctttgggaaactctagagtggggatacgcatttaagttttttgcaggtggtcttgaggccacgattggtactcatctctctgctctactacttattctagattcacctccacccttggctagtacttctgctagtctgaggttacttacttggtaaaataacctgacctttcatcccttgggggttcagggcaagtcaggattgctactgtgagaccaaagctgacgaggtcccaccatctagatagttgcgggtcactttgtcggaaagagaaagccaagtgatgtgcatggatggctcttctttgcttggaagtgacacacatgacttctgcttagagtgcattgacaaagctagccatagacttgcttaatttgtaaggaaactcggaaatgtggggagagcagacttcagcatagtggtgagccccagcctctgccacagtctgttcttctggctggcaaacattcctttgctccctttattccacaccttcttaagggaaataacccaaagttctattccatcaagacatttatcaaatccaggcattgttcctcttggtccagaaacataggaactggaatgaccaaattatatggccaaccctataaccactgctcccctgccaaataccatagatggagtggtcagacagggccagtgttatcacagtgaacaatcccatttagaaaactgaaaaatgcagtcattggttagttgtaattaaattcttctgtacagacattgtgagtgtcccttgccgtgggtggggaatattcctaatcagtcctcctgactgatctctgtggttctctatagtacctggctctaccctgtgggagagtcatctttttgctatcctcatgaatatatctaaagtggatattgaagaatgtattttccttgagggctgctcacctttctcagcctgcttcttacctataaaagattggggcccaagggtcattttaaggccatccttctcagccttgccactattgacattttggagcaaacagttctttcttttgatgatggaatgtttagtagcattcctggcctctacccactagatgccagtagcactccccagttgtgacaatcaaaaatgttttctgacattgccaaatattattttggggcaaaattactgtgaattgagaactcctgtttgaagtgtagaaggatcatagacctttggcgttaggtctgacagttaactaactctttcagaaatttaagagatttcttatctttctgattgtagttcctttcatagtatcttttttagctcatgggtcctgtattcttggacttaattgaggctgtcttcagtcttcctgtaagctttcaagcttctgttggcagactgaggcaaatttatcaattgaaaattttacaggactttttccctgaaagggtttcataattattatgtgaaaatgatgcatagaaaccaacccaagatatcagtggcttaaggcaatatttattgtttacttgggtctgcagggttggctgtgtgacactgctccaaactgtgggtcaagttcaggcttgtcccatattcaggtttcagcatctaaactgaagcatacaccagagacatccttttctcatggtgaaaggtagaagagcaagagctatgctgagtcaaacacattcccccatattccattggacaaaataagacaagtgactgaacctatcgatagggtgaggacacagtctggggtgagcaggaatatttgcagaacaatctaccatactttcttccaggggtctagtagcatttagcttttccaaaatggcaagaccctgaaattctaggctctgttcccttttatttctgctttaaaaggtggctacttcttttaaatgcaaccagtagctaccaacacaaactactgaagttttgctttccagtcttttctagagcagggttcaacaaactttttctgtcaaagccatgtagtaaatattttaggctttgtggataatagtctgcgtcacagctacaagactctgccattgtaacacaaaagcagccataggtgatctgtacttgaatgagcatgactgtgtttcagtatcagcactttctttacaaagcaggcaggccttaatttgccagcccctgtgctagagcttcaggttcattgtacaagtggctgtgcaggtgacagcttcatgaaatgttttgttactacgtaacctagatcacctttccagccttcgatgtgagtttccctgctgctcaactgctaagccaggatcttatgtttttataataattaacaccccacctctgacaccagtttcagtgttagaatagactcagctgtactgaataacagataaacccttaattctcagtggcttagcacgactcaggcttatttcctttgctgaatgtgtggtgcagatcatggtgggtttgtggactgtgcgtttacatagatgatcagcaacccaggctgccagagaatcctctggaaagttcctaatcaccaaagcagggcaggagatgacaggaagttgtgcactggcccttctcttctttacttccactcacatcccatgaactagaactacccacgtgcccttgcctaactgaggaagctagaaaaattgggggaagaagacagaatgttgggttagttccactgcctgcataaattctaagttgctattcttatatatagttagcagtgtaattaacagctgtaaggtacatattgatatatatggatgaatttcaattaatagtctttgaggctttttttgacaatttttttgcttaacaaaaatatctgtctttaaaaattgttactttgctcttaattttttcacaatgaagtgcttgaaattggaatgttatttctaaattggaatctgctagtataaagagccagtaaccttcaaccatcacactaaacattgaagtagtatcaaagcttgtaatatttattcttaaacatgcagtgtttctttgctgaggtactgtattttagaagtattagcaacattatatttacagaataccaataatgaaaatttttttcttctgtttcattaagacctttgaattgttggtatatttaatttcataaaaccactagattacatatcttctaaacccatccatgattgcctgtcgaaatatgttaaagacaacatacatgcttttctgtatgttaacattacaaaagtaatacaaaagtaatagttgtctttcaagcaggctattttccttttttgtattaatcggtgatatttaatatgtatactgcatgtcagtacaggtaatacagtgcatttgtgttgtggatttatgctttcttcgttttttggtcctttggcttataatagtattcatcaaagctaacaggcaaagtatgttaaacatgaagccatgagtgtttatgctgctgcctgacttttgatgggcacagcacagaatatgttaaagtaggggccaggtgaaaaattctgaattattcagtagtatctatagcaagtaattttatagattagtggcaccaaggcaatggtgtcctacttctacaaacagacagaaattttatagcaaatttgtgtgacttcaggtgggaaatcagggatggaaaaatggataatgactcttctagtcctttggaactgggtatctgccagtctaaaagatcaaataacatttgttaggattgacaagatggctcgttgttgacttaaaacatctgtataaagcttattgtgactttaaaatgagattttaaaaatattggtaatatgttatgcaaatgaatataaatgctaacttatgactttcttttactatagtagtttttttatgtgagctttgcgatgtcttttcaaatcccttttactctaaccaaaaatgtctagctaatcataatttctagcaattaaaacattactaacttctctaataactgtatgtattcataaattttaaatcccataaaactgacttctcaggtttgccttttaacgatgaatcagtgcagtaatattacagtgagaaaaacgaacaattaacatgaatgttttgcaagggatagtataactttattgtgaactgtaggattttcctatatatcatggcagtcattttttaatttttattttctgaaggacttaaagcccagtaatatagtagtaaaatctgattgcactttgaagattcttgacttcggtctggccaggactgcaggaacgagttttatgatgacgccttatgtagtgactcgctactacagagcacccgaggtcatccttggcatgggctacaaggaaaacggtcagcacacacatttatttgaaatatttttctgatttagcttttttctttattcagtagatttttaatgtaaatacttaagcagaagtacgttgagttaaatgtgtatcattgtttgaaatgtgtatcaaaagtttgcaggtaactataaattttttcatcaatgtttggaaaaacttggggcccttatttgtttaaatacggatacataacatcagtactaccattggatgaagaatttgttgccgtggccctgagacagaatttatgctctttgcttgcctataacttgaaaatgaacatttctaacatggtctcagggatgtatagtgtactgacagtttattattagtgtacatcagtgatatttgcctatatttccaaccccatgaaactaaagctcatagcagtagcactcattgtaaattttaagagatacattaaggcctctgcaaagctgatggataattaaggtgacctcttgaaggaagcagtaaagtttcattaaaacgttgtatccagccttaaggaaatgacttttagtattttgtatgggtatatccagttgtatcaatcaacctaagaatcagtgttgaacaaaattatctggcatgtagatcatgaatttaaacattttgtatgcatatacctacttatatttaatttaggaagaaattttgttgagtcttagaaatttaggagatgaataaatctgctaagaagcatgggattttatggaaataaaccatcgttttaaaaaatgtggtgacttcatccaaaatactaccaagaataaaacctagacattttttctggcaaggaatctggaatagcagttcattttgaatcaggaaattgtaataagtcaacttttaagattctttttttataaaagatacaattaagctgagcttgattttctgagctgattaaaaacaaatactttaaacatttgctattaattttttattcttaagtaaatatgctgttctttttacttacactctacctgaaatttgaagttttttattttttgggaattgataacttcacgtgacccaccagcatgaagattgcttttgcatttgctgtaattgattgtcatagatatggtgttatgtgtcagtgtcctataaatatgatcttaggatagctccctgccagaaattagcactaagaaaaactgtcatatatagaattgaggctgggtatggtcgcttacacctgtaatcccagcactttgggaggccgaggctcgtggatcactcgaggctaggagttctagaccagcctgagcaacatggcaaaaccctgtctctactgaaagtacagaaattagtcaggtgtggtggtgcacacctgtaatcccagctattctggaggtgaggcatgagaatcgcttgaacccgggaggtggaggttacagtgagccgagattgcaccactgcattccagcctgggcgacaaagcaagactctgtctcaaaaaataaaatagaataaaaaatgaactgacatatggttcctctttagttaagaattatgtagatcaccttcttgccttcccactcccaccctaggaaacggagtcaaatgtaatgcttaatgattataactacattagccagcaaggttaaacataagtacttcctccttttaatgacacctcacactcattttatttatcttatttatttatttatttatttatttatttatttatttatttttgagatggagtctcactctgttgcccaggctggagtacagtcatgccatcttggctcactgcagcctccacctcctggcttcaagccattctcctgcttcagcctacgagtagctgggactataggcatgtgccaccatgcctggctaatttttgtatttttagtagagacagggtctcattatgttggccaggctggtcttgaactcctgaccttaggtgatccacctgcctcagcctcccaaagtgctgggattacaggagtttgagccacaacgcctggcctcccacccattttaacaactttgctttatgtaccttttattgcaggctactcagagcattttggaaagcagtgtaatcaatatatttttaactgcttaatagactaagcagttagtttacagctagagttgtgcatgaatcagacttatgttcctagtcttcactggcccagataatatcttctctcatgcttgcagctttcaaaatacttttgtttaaaaatgagcttttctgaaagttaccaaataagttgtaagctggatatttaaagtttaacattctctataaaatctgtagagaagatttattctaatagatttttgtcaaaaacggaaaccttagaaaaaatttttctctgaggcactaatttataaatattaaattttttttctaaaatcttatccttgaaagctgaaccatgacataaatatgaaaatattcattcattttaatatgacattttagggaaactttagttccacagtatttccaaaagtaatttccagtttagctcttaagactcttcagtgaactggcagccttttaataagaatgtactgtattagaaagtacaggctttaattttctaagtcctttaacatgagtaaagggcacgtgtctttctgacatctatttgtgccgttttccacttgtcattttaaagaattgggaccttcagatgtcacaactaaatgcaagtttctaaggcttttccttctaaattgctcattcttccctcttttcctgttacactgcaagcacttactctctcctttttgtgtgatgttcaaacccaaaggcataaaatgccacgatgtgttgtcagtttcccttagtaagtggagattccaaattgtctgtttctgtgtctagcagattcttgtcaacattgattgggattcccatttacagttggcaagggtcatcagtaagtcttccaggagactcttcatactcaattcgtgggaactgacttactgtatctagccaaaactaacttcttaagccaaaagcagtttggttttatgggtttaaaaaactttaggtaggaaacatgaaatacatttctcttactaagttttccttgattagttgttcattctctgtgcacttgttccttttgggatagtagggtaaatgtagcatgatgttgccaagaaaacaaatggacttttaattcagaacaagcatagcacttctcagttaaatgtatttgggaaatccagtttaaaaattccaaagagctttagattaacttttttatcataattattcatagagattatttctgttagatattttaatatgctgaattattttctcatgcttttttcttagagagtataatgcacagttgaacttctaaatagtatagtataacaattttatttttataattttactacctcatgtacatttttatttacaaagtttgtgtttggttctatttcatattttataaacaagttctcagggacaaacatgcagggtttttctatttatgcaatttctgtgcatagctctcactttgaaattagatatgtagttaaaatgccacactttacattttcttttgtgaaccagactttcaaaaaataatttgtgttttaaattattccgttagctaaagttacaatcactttttttcttttcgtgacgttttgcagtttttatataatgcagtcatattatgcttctttgattttaatgaccttttgctttgcttttccttcttttgtgctgcaaacatatagtggatttatggtctgtggggtgcattatgggagaaatggtttgccacaaaatcctctttccaggaagggactgtatccttgtgctgctgcagcagttaattagttaggcgatgaacttctttatgttctctaatgaaaatgaatatgctacatttacacagatgggtttttaaacaggcataaagtttgtggctattatagttcaaaaattgttgagataagaagctgaaatatttgtaggctgcatctggcagtaggacatacagtctctgctggtagtcagagcacattcactgtcactcatttttattttatactgctttttataattttaaagtatacatggtgtgtgtgattttatttctttctttttttttttattttaaccaaaatctttatgttaatgtcattgcattttgttttcagttgacatttggtcagttgggtgcatcatgggagaaatgatcaaaggtggtgttttgttcccaggtacagatcgtatccttatctttggcctaaaatgtagtttctaaaggtcaaaatgtatgatagcacttcagtttggtcaggtataatgtattttgtctctccctaatatattgttaaattactcttaaaataccacctactatttgacatagacttttccttccgttatttattgtttcatatgttaattctgaaccctgctcaattgtaattatgcacaattacttgctggctttgagttgatttaacctaaatcaaaaatcatggcttgcattaaaaatttataataattatacacttaagtctagaaatacgtacaacttaatatgaattttggagctgtctgttgcttctggccatccttttgttttgtcccctacctcctttttgttaatgttctgtgtggtttgtgtcttttgattgttgtctcattactcacataacatactgaccctttcatctgagaatttcagcagtagtagttttgtatggtaacgatagctttggattcatactttttgttcatcccactacttttaatatttatattaacagtgatttgttatgtgtttaccagctagtaacacttagaattgtttcaggaggaagaatgggaaaaggcatattcacaaggttacaataagtgagttttaggccttggccttcagggtcctggagtgtaaagactagaggaaaggagaccaagaaatcctaaccttacaacttagcaaaaaactgaatcttttttataagggtcagagctttagaaaatttttttaaacctaagctaaacaaagaatggcaaaagaaaatgccacttttatcgaagcctttatttttattacaactgattattttctgttagtgtagaaaactcagtaaaacaggatgtgttctagaaatattgtctaggagatataatcatgttttctgataaattgacagaaaaggaaaaattttgtatattattatagcattgtgtgcagtttgcagttagagccactatggatagtaattgtcattattcttagttgcttatcattttatttagaatttgtgagtttaagcttccattttaaggtaaaatcagttagtttgaacacacaataaataaggttaataaagcttatttattgatcatttctgtccacctacaatcattgccttttgcagggtgcctgtgagatataaaatttataactgccacatcctttcttaggaatttttaaatttctattttcttgtaatatgaatatgactaatgtattgaacattagttatggagtatttttcttagctacttgatattagatattgatcagtggaataaagttattgaacagcttggaacaccatgtcctgaattcatgaagaaactgcaaccaacagtaaggacttacgttgaaaacagacctaaatatgctggatatagctttgagaaactcttccctgatgtccttttcccagctgactcagaacacaacaaacttaaaggtactttttacaaatatgtacatttaatcccatttggggtgtgtagtgtgtgtgtatgggtttgtgtgtttatatgtattcatattcttatgggacatgaacccaaggttttctctggatggtggggaaaaaaatgaggtttttgttttttttttctttaatcttatatattttaatcatatgtataagataattttacagtaatatttttaaaacatatgctttttaaaaaatctcaaattgctgaaagttattaataatttgagaatctttacaaatatatgtacattaacaccattatgtttgcagccagtcaggcaagggatttgttatccaaaatgctggtaatagatgcatctaaaaggatctctgtagatgaagctctccaacacccgtacatcaatgtctggtatgatccttctgaagcagaagctgtaagttattttcttaatgtttacagaacatattgcattcttagagttagaatgacagttaggtttggaggagaccttttaattttaaataaaaatgtagatacatgatgatgatgtttttctgtttcttcatgaagactacgtcaaataaactaatgaacatattcgagcccctcctacacaaaataaagttacctcccactgttttttgcaatcttgcctggatacctaaccagagaactaggatgttgaatgctctgggggaacatcctaactcaggtataaaacaaattactgtatccaaaggaaaacagaattctgtgatctgtgatataaataaaatgtggcaatttcaagagctagaagaaaagaaaaaagacagttaaacattttatttcctgcaatgaaggagtcttcctaaactattatgtctgtataagtaagttgatgattgatcagtcttgatctaatgatatatttttataagtcatctgtgtggctaatatttcaaataactacagagttaaaatactcccagcatactgacttggttattattgccttgtgtttttcagccaccaccaaagatccctgacaagcagttagatgaaagggaacacacaatagaagagtggaaaggtacattcgtcagattcttagagggaaaactgtgaaggagcttctggtttttatatggtgatttattatcatgttagagaaatttgtgactttaatatgcataaccgaaatgtggtaatattaatatttttacataagtagaaagtaagtctgcttccttccttaacttaatcttaagttcccaagtttcccaccccagacacagacacattagtgctctgtctcatatttttttccatggtttgtgaatacacaaatgtgtttagtgtctcccacctctcctcttccacccttttaaaatcacgtatggttgtgtacggtgtatgctatatgtacttgctttgtttatttattatatatttttttgagttggagtctcgctctgtcacccaggctggagtgcagtggtgtgatctcggctcactgcaagctctgcctcccgggttcacgccattctcctgcctcagcctcctgagtagctgggactacaggcgcctgccatcacacccggctaatttttttgtatttttagtagagacagggtttcaccatgttagccaggatggtctcgatctcctgacctcgtgatccacccgcctcggcctcccaaagtgctgggattataggcgtgagtgctttgttgatataatcagatatctggaaggttattctcttttagttcacgtatctgcctctcttgctttaataactggttagtgttctgctgtatgaatatgtcacactttatatatccatctccctcttggtgaccatttaaattgtgtccagtctgttgctgttagaaacaactctgcaatattcatgttcacatatgagaacatgcctggaagaaaaatcctggaaggagatgttctgagccaaagatatttttcagttatttccaaattactctccaaagaaatggtagtagtgtacacttccgtccatgttatataggagtctctctttgccctcacccttgcctacagaatgggttaatttttaatatttgtaaatctaatgtagttttattctattttatgaatgtggctgaaattaatcatgctttgatagtcatggaagttttcaaatatttcttcaaaaggtgccctgggacatgtgggtcaggtaatttttaggtcccgtttacttccatttgtgttattgtccttcagtgttttgaccacttttgtaactgcgtgactttgagtaaatcactcccccttcatctcaccctcctacactgccccctgcattttacctcatcttaaaatagaggcagaagacctgttattaagagttgtctctaaatcctgggaaaggaaaggggactggggaggtataaacatgaataagtgacccatctataaatgtattttgctaagcatgaatttgattctttcttagaaattgaagagatttagagattggttttctctgaactttgggaaacccatggttagcagagcccgtgataaagttagaagaatgacaaaatgataaaattggatagagtctgctgcatttgaatatgtaatgtgcatttgaatatgtataaagatatagctctgtactgagtatgtatgaaaacattaacctaatatttttacatcctactaatttacagtagacgatgaagtattttgtagaatcttgtggtttttttggttgttttttttgtttgtttgtttttttgagacagggtctcactgtgtcccccaggctagagtgcagtggtatgatcatggctcactgcagcatcaaaactcctgagctcaagtgatcctgctgcctcagcctcccccgtagctgggatcacaggtgtgatccactgcacttggctaattttgttttttttttttgagacagggtctcactgtgttgcccaggctggtttcaaacttctgggcttaagtgatcctcctgcctcagcctcccaaagtgctgggattataagtcttaagccactgcgcccagcctaatttttaaaaaaaaattttgtagagatggggtctcactgtgttgtccaggtcatagactcttaataggccagcagttgtaaggcacaccattatgtgccacaaagaaaaaaacaccttcggttgtacagcaccattggttataagatatagtcaatttcagagattaaactgtgaaaaaagtacatcttaaaatcagtgagatacagtgttttcatttgtataaggatatatttgggggttttgattgctttaaaaacatttacctttattctgtatcctttactcctagccccaggtgcatgtcagtaattacccacagactgcctttttcaagatctacttaagagttttagcgcatagcagaaagaaagattaattgccaaagccattaattacagatggctttgcctagttagtgctcctaattagttttggttcttctgccttaatccctttgtgctttttcccagaggagtgctattttctctcttaaaaaatcctcttactgcaaatgtttatcattcctttttgtttctttgaagaaaaccatctcttattctctcctttatcagtgctttctatttttctccttccaagccttaagttactatagcaaacaaacttatctccagttgttgttcattccaacatattcatttgttttaccttattaccaatataaatgtcatactctgtaatcagggattctttatcagaattttattcttcaggaattaacacagactccttgaaattcgatgcaatattttttgtttgtacatttttctcagaagagggttcactacttttatacaattctcaaaagattccatgacccaaagaagatgataaatagtgttgatgtggcatccaccattaaggttaagtgtggtgtgccctgtgagtctgaatgtctacttaagaaccttaagtagacattaagaaccttaagaaggttttttgtttgtttttgtttttttgttgttgagatggagccttgctccgttgcccaggctggagagcagtggcgcaatctcagctcactgcaacctctgcctcccaggttcaagcaattctcctgtctcagcctcccgagtagctgggactgcaggcgcctgcccccaagcccggctaatttttgtgtttttagtagaaatggggtttcaccttgttggtcaggcttgtctcaaattcctgacctcaggtgatccacccacctcggcctcccaaagtgctgggattacaggcatgagccaccacacatggccgaaggttcttcttaagtagacattcagactcacaaggcacatcgcagttaacatcagaatcacttctgatgataatataagtgaagaatataagacaggaggcgcatatattaataccagcagagcagctcccagtgtgtctcttcagttggaacagttgttgcagtggtctacttgctgtccagaagcctgataagagaaaaagattcccatggagaaatgttcttcgaagtgataaccatgcttactcataaggagttgaaatgtagcttacctgctagttttcctccaataaaaatgtgtttatctttcattctgatttgttgtgaagcttttgcacactctaatttaaatcttggtagcatatatctagttgagtacccacagtgcaccaggctctattccagggcccaggaaatggaagtcagtaagacacgtggttcaagccctccctgagacagatggtagtacagaatggtatgtggtatgatgtgctgtagcacaagttgctggtagagtgaaaaagaaagcttctaccccagcactatcaaaccaacttcagaaacagtgaattacaggaaagattagtacttccttttaatatgatccattgttgagtgtcaaggaattgttattaattaacatccttgaatcttaggccgacatttaactgactgtcattgtaaggacactgtttgaagtacttcacatgtataaaaatttccacttaaaccatacatgcgttgtgagattggctcttagactttgaaaagttcatttttgtttacttcttttacagaattgatatataaggaagttatggacttggaggagagaaccaagaatggagttatacgggggcagccctctcctttaggttggttacaatataagcttggttaagattacagtttacttcttgtgttgtaatcttcagtggcctgaaacctgcagttcttcccatatttacaaaatcattattattccaggcttaataagtataaggaaatacagttttgttttttctactaatacattatactaatatatcagtaactgttcataagatgcacatctttttctatgatactgacattctgaagaacagaaatttaaaaactttttgttggcattgttgctgggtctttaaagaggaaacttctcaaaattcaatatacatacctttctatgatcttgacagtctttactttggataaataaaagcttcactgcaaaatttagtacatgtaataccaaattgctgtctttctctttttgatattattgatttgttgaatgaaggcaataacattaaaaccatcactagaaagtattctttctctaagaagaaaactgggtttgtaggagttaaaacttttttttatcataagctgatcttatatttaatgttagtacaagtaaaagtataaagaatagaggggaaaagttaaatggcaggtaacatgtacactaagtacataccacataacagacactagtggtttatatactttatttcattcagcccctaagatcctaaggtataggattattgcacacatgttatggatgaggaaactaaagttcagaaatttgaagtaacataagattccaaatctattatgtagatgaactaatacagtaacttcagagtgtgtggttttttcagcctcccattttgttatctggctggcaacagagacttctctggctacagaggttaggacagttgtatgaaggaggtgaaatttgagctgagccttaaagagtgagtagtatttcaaaagatcttgattttgaagtaaaactatgccattttaattcctcagaaacttctacttttgaggaaaaaaatagatgttgtatctagcatcttgtatatgggtaaggttttttaaactatagcgacattgtatactataaacataattgtttaagccattttttgtggcttgctttgacatttttggttatatattttagagttgtatattttaaatctttgatcaagaatgcaatcttccagattatagtgtagatcctgttgaatatatgaattggttttgaccgcttttacctattttggaaatggccttttctctacaatttacttataacaaatttaaagctctattataaatgctttgtgtaattaattagctttgtattgctatatagtagtagtagtaacaattgttcatgatggaggctcaggtgggatttgaaaagttcattatgtgggacagttttatactttagcatactatccaagtgagtggcacagctggagtgccagatgtttgagtaaatgtaataatttcatgagttagagcatttgtatttgttcttaatttgtaagtgaataatttgaatcttagtccagcacttgcttatgatcacaaaataagtcagtgaaaaagatagaaattgaggtttctagactttttctggatcctcagttatagcttgcaaagacgagtattagcaaattaagctgttataaaaatattctgctcttgattttgtactaaaacagaaggagtagtgtttggtaaatcaaaataccagataaccacagtaccatttccacttgatttttaaaaggaattttattctttttccctgtcgagtgccttcctatctttgttttggtttggctaatagtaaagtaagtttacctgccttgagtgtatagaggctcacttaagagaggaatgacccatgtgagactaaagattttccatattattaccattcagatatttgagaatttactgtattgctttaaagagaaaacaagtgtgtgttttttccccttaggtacttgatttttagattaaaaagttaacaatgcatttaaaagtcaatttttatcagattaagacatttgggtaaaataatagaccctgaactagaggcatatataaaaattgtatatgttggagcccttttatggtttgaatgtttcagtacaagtcttagaaactagtcattgtgtactatgtatggtacacagatataccatactgttcagtcagaaaaggctcattccaagtattgattgaactaaatagaatatactatctgaatttcactctgactgggaagctaatggacctttcttgggtctaggagattatcacctcttttacctctcatctctcaggcctgaaatgctcatcctgcttttctcttccgtttcagctcccatcacatgctttgtctcttgtggttccattcctttctgtatcccagtcccctccctaaagattttcctattcccactacactgcctattttctttttgcatttgaagaaaagctcacagaagacttttcatattgaagtgtttcattgctcatctggacagaatggagggatgatctcaaatacagatgctgggttcaggagcagtggttttcagcccatttggtttcagcatctttgggtgcctgaacctcaccctcagaaattctgctcagtgttccatttgaagaccattgattttatttcataaatgtattcttgagaacttttaagtaacttgcattattccaatttggaatgacccttatttagtgttcatgtggttcagaagtacttagcctagtgcatgagttacctttaactatccttcatcccccagcataagtcattcctgtccccttcctaaaccaatccccttgagaggatttctgtctcgagctcaggtattcctgttaactttttaaaatccaggaaatgcttgttaggtaatactttcggcaaaggaaactgtttgctcttactatatttaataaatccatatttctgcttatcaagtattagagtagaaataagaagacccaagtttacttaactaggccacttgagtgacagtggcatgtcccataacctcgtgtaaagtggggcagttgaattgaggtttcttcctgttaaacttaattttattccttgtcttggcatttgctttaaaacaagatgtgccagaagtacatcttgtttcaaatttgaatcatttgaatttttcctttttagtgagaagctgtaaagacttttttgtagggaagtagcttttaacttttgtagttacacagtcctttaagatcctctgtccaaaaaaaggcattacagacagttttgcatgtattatcagcagtattcacacataccctgaagcccattcatggatcttgctgcaggaccatttctaaatgtggttcagatgtaaaattcttgtcttaaactgaaaaacacattcattgaaaggataggactccacgattctagacattttcagaattctcacctcatagctgtcaatgaagagtgtttttaagttagtgtgttggatatcatttgcgattatttttagtgagccttcgaaacccaagagaaaaaaattaccactggaggcagtcagtgcagtgcaagtagcttgatctgcagctgtctgcaactgatttgctgttttgtttctcatagcacaggtgcagcagtgatcaatggctctcagcatccatcatcatcgtcgtctgtcaatgatgtgtcttcaatgtcaacagatccgactttggcctctgatacagacagcagtctagaagcagcagctgggcctctgggctgctgtagatgactacttgggccatcggggggtgggagggatggggagtcggttagtcattgatagaactactttgaaaacaattcagtggtcttatttttgggtgatttttcaaaaaatgta

SEQ ID NO: 38 - protein, 384 aa, Homo sapiens
MSRSKRDNNFYSVEIGDSTFTVLKRYQNLKPIGSGAQGIVCAAYDAILERNVAIKKLSRPFQNQTHAKRAYRELVLMKCVNHKNIIGLLNVFTPQKSLEEFQDVYIVMELMDANLCQVIQMELDHERMSYLLYQMLCGIKHLHSAGIIHRDLKPSNIVVKSDCTLKILDFGLARTAGTSFMMTPYVVTRYYRAPEVILGMGYKENVDLWSVGCIMGEMVCHKILFPGRDYIDQWNKVIEQLGTPCPEFMKKLQPTVRTYVENRPKYAGYSFEKLFPDVLFPADSEHNKLKASQARDLLSKMLVIDASKRISVDEALQHPYINVWYDPSEAEAPPPKIPDKQLDEREHTIEEWKELIYKEVMDLEERTKNGVIRGQPSPLAQVQQ

SEQ ID NO: 39 - protein, 384 aa, Homo sapiens
MSRSKRDNNFYSVEIGDSTFTVLKRYQNLKPIGSGAQGIVCAAYDAILERNVAIKKLSRPFQNQTHAKRAYRELVLMKCVNHKNIIGLLNVFTPQKSLEEFQDVYIVMELMDANLCQVIQMELDHERMSYLLYQMLCGIKHLHSAGIIHRDLKPSNIVVKSDCTLKILDFGLARTAGTSFMMTPYVVTRYYRAPEVILGMGYKENVDIWSVGCIMGEMIKGGVLFPGTDHIDQWNKVIEQLGTPCPEFMKKLQPTVRTYVENRPKYAGYSFEKLFPDVLFPADSEHNKLKASQARDLLSKMLVIDASKRISVDEALQHPYINVWYDPSEAEAPPPKIPDKQLDEREHTIEEWKELIYKEVMDLEERTKNGVIRGQPSPLAQVQQ

SEQ ID NO: 40 - protein, 427 aa, Homo sapiens
MSRSKRDNNFYSVEIGDSTFTVLKRYQNLKPIGSGAQGIVCAAYDAILERNVAIKKLSRPFQNQTHAKRAYRELVLMKCVNHKNIIGLLNVFTPQKSLEEFQDVYIVMELMDANLCQVIQMELDHERMSYLLYQMLCGIKHLHSAGIIHRDLKPSNIVVKSDCTLKILDFGLARTAGTSFMMTPYVVTRYYRAPEVILGMGYKENVDIWSVGCIMGEMIKGGVLFPGTDHIDQWNKVIEQLGTPCPEFMKKLQPTVRTYVENRPKYAGYSFEKLFPDVLFPADSEHNKLKASQARDLLSKMLVIDASKRISVDEALQHPYINVWYDPSEAEAPPPKIPDKQLDEREHTIEEWKELIYKEVMDLEERTKNGVIRGQPSPLGAAVINGSQHPSSSSSVNDVSSMSTDPTLASDTDSSLEAAAGPLGCCR

SEQ ID NO: 41 - protein, 427 aa, Homo sapiens
MSRSKRDNNFYSVEIGDSTFTVLKRYQNLKPIGSGAQGIVCAAYDAILERNVAIKKLSRPFQNQTHAKRAYRELVLMKCVNHKNIIGLLNVFTPQKSLEEFQDVYIVMELMDANLCQVIQMELDHERMSYLLYQMLCGIKHLHSAGIIHRDLKPSNIVVKSDCTLKILDFGLARTAGTSFMMTPYVVTRYYRAPEVILGMGYKENVDLWSVGCIMGEMVCHKILFPGRDYIDQWNKVIEQLGTPCPEFMKKLQPTVRTYVENRPKYAGYSFEKLFPDVLFPADSEHNKLKASQARDLLSKMLVIDASKRISVDEALQHPYINVWYDPSEAEAPPPKIPDKQLDEREHTIEEWKELIYKEVMDLEERTKNGVIRGQPSPLGAAVINGSQHPSSSSSVNDVSSMSTDPTLASDTDSSLEAAAGPLGCCR

SEQ ID NO: 42 - DNA, 58478 bp, Homo sapiens
gcggcggcggcagcggcggagaagggagcgggaccggaagggtcgcagcgccccggcgcccctcacacccactgcggcggcggcggcggcggcggcggcggggcggagcggagcggggcgggccggcggcggagccggggccgcggagccaggagtgactagcacgcagcgccgccagtccgcccgcccgccctctccccgtggcgcggcggcggggaggcgaggtgagcccggcgggcgggctaggcctggcggcggctgctcgggccgggcccgcggggaggggcggtgagggaaccgcgcggccgggggcttcggggcgggccgggggctgcggggccctggcagccgcagccgtcgcccctgtgctgggggatgccgcaggcgcccccttccgcccggctgtcagcagccccgggctgcgggcctgctcaccggcctggcccggccgacctgcccgtggggtctgcgggcgccatccctcccggaggtggggcagacagctgcactcctgcgccgggtgcccaggggcccggggtcgcgtccccgcgaccttggccaaggcactgaccctcgctctgccgcggttttgccttcgggaaggtggggaaatgtctcttctggacagggttgttgtcaggctgtgtgaatgtatgcagacgcctgggcaggaccccggtgtgcatctgtggaagactgggcagggtgctggcccgtgctggtgtgagtggtgtaggaaccccctccccacccgcccagcctcccgcctccccgcgcactcctctcttgccttgtcattgcacactcggtgtccagcagtgccagaggggacccagcccgaatcccttaccaccgcgcccctcccccagaagactgctgccccgtcccactcatctcgcccgccttgaacatgccagcccgcatttgccccaggacctttgcatttgctgtttccccgtctttggagttgtctccgtgatcttggcacaagtagctctttctgctccttcctctggtcagatgtctcgttttgggtgaggccctcctcgaccaccctctttcttcccttagtcatgctatttcattatttaaaaaatttccttcctagctctcatctggtttgaaactattctatttatttgcctgcttattttctgtctccccgactaggatgtaactttgtgaaaacaggtagctgtctgatttgtccactgctttatccccagtgcttagaaagcacacaggaagtattcagtagtatcagctcaatgaatgaatgaatgatcaaagaaatggcccagcctgcctgttgtctctgctttatctgttcatttagtgacttctgattagcgtgtgaaacttgtaagcagatggaagcttgttctattttgtgaaacattttggtgtccttgacccctttaattgctaactgttggaacaagctgtgatataaaatctcacatttttataatagtttagctgtagctttcttccacacatacaagagacatttactgaattctgcattatctaggtcatgctttctgctagaccctacggacacaaggcagatagcaacggggtccctttcccgagagagcccaggagcccagtagagaaggcaggcatgcagacacttagttccaggactgtacaacccttgctataggggaggggctatgccatggaaatgtggaggaggtgacaggtggtgctggggggccttgagggtgataagaaatttgctaggcagggagaggcacagaggtgtgaaggagcagggccaaggaaggaccgtaggccactgtggagttgagaatcagtctggagggccaggtgtaaggacacagagtcgtggggaccctaaagaacaggaaccttacccagcagttttctagaagaaggtggaatttggctgggtgccatggctcacgccagtaatttcaagacactttgggaggctgatgtgggaggatcacttcaggccaggagttcaagaccagcctgggcaacgtagcgagatctgtctctacaaaaaattttaagaaattagctaggtgtggtggcatccacctgtagtcctagctgcttgggaggctgaggtggaaggatcccatgagcccaggatttggagcctgcagtgagctatgatcacaccactgtgctccagcctgggtgacagagcaagaccctgtctctaaaaaggaaggcagcactccacatttgttctgatttttaaatgttggcaatagctaattaaatttttttttaatgctgtgagccaagccaaatacagattcattcagcttggttgcaggatcgtcatcctccaggactggctgtgtgggagggaggagctgtgaggagagcaggaaaggtagcctaaggccaggggagccaggccctgtttgcccaggtgccagcccagatactcatttgattgtaactggagccctgtggaaacggaagctcaggagtctaagtagtctgtttcttagcaagcagctggtgagtggagttcgaacccagatcacttcccagataaggattctttcctgggtccctcagctctgagtattctcttttggcttttaacttgttctggaagaatgaccaccaatctatttaatgttttcctccatttaacttttttttttcttcaaaaggatcctgcagagttaaaaacaatactatttttgcatagacttctcttttgacagctttgattttcctggcaatttaattttcagggtgccaggactttaatttgttcacagattaaaatctgtttatttggtcccgtaaataaacaacagaggggatacttgaatgtgtctaagataaaatattcttaattttctggataaagaaaaggaccagacaaaccagttaatagcgagtaaaccagttgttttcatgaggcataagataaaacagagaccagattttttttcttcttgagactattgatttgccaatagggcaactatttttggtctacatacatacagtagttacacctcacacttggttaggaaggtgccatttttacataattttccttcagaataattaattcctgatactttgtacttgattgtatgaaccagtttcaacatcattctttttattttaacttttattatgggaactttcaaacatatacaaaataaacagaatagtgtcctgctttaacagttattaactcctgaccaatcttgtttcatctctaatggtatccacttgcacccttaccacccataattattttcaagcaaatcctaaatatcatgtcatttcattcattattttttgggatactaattacacagtgggtgcccagtaaatgtttggtaaagacaaagctaaatgggagaataaatgtggtagggtagctcggagcagtgggtaagatcaggactttgagtcagactcccagtgggtctgctgcttatctgggtgatgtgcagaagcgattgcactcatctgtaaaacatacgggcacaacctcagggtgctcaggaggtgtacagtagttatacttcacacttcggtaggtctctaaaggtactgactcttttaaagttgaaaaagtaataattgcttaatatcatcaaataactagtcaatattcaaatttccagctgccccatgaattttaggtttccttaatagtttgaaagtagagcaagagaaggccatacgttgttgattggatgatacgtcttttaagtttctcttaatccatagatccccctcctatttctttgttttcttggtagtttatttgttgaagcaatcgagttgttccttagcatttccatagttggtatttgattgattgcatctctgcagtgtaattgaatgtgtttctctgtaatctctgtaagttagtaattggatctagacgaggcttcgtcagatttagggtgcattcctgcatcaagatgccttcctaagtgggctgtgcacttcttatctagaggtaccctgaggctctctgctcgtccgtgttgcagatgagtgcaatcgcttgctgcacatcacccagataaatagcagacccactgggagtctgaagtcaaagtcccgatcttaaccactgctcccagctgccctaccgcattttttctcccatttagctttgtctttaacaaacattttttgggcacccactgtgtaatcagtagaggattgagaaataaatcagacacattttctgcccttacagagtagaagtgtaagtagactcggaatgcaatctaaagcgaatactgggagggtggcaaaaatgggggcatgcccagcatggtttgaagggaaaggctggaggaggaaacatgtaagagaagcaagtgcttgaactagatttttgaaggagggtgaatgttgaccagcaggtcaaaaaggggagggaagtcatttcaagcagatggaacagcttaggcagaggcctgaaggtgtgcagtagctgggtgtgtccgctgatcccaggtggtttgatgttgcctaagattgggccagaggactgccatctcctgtgctgtgctagggaactgaatcttattctccaggcagtcagtcactgttgaaggagttcaaatgggagaatggtgtgatcactgcacactttcaacaaatctctcttttttctttccatattttgaaataattatagattcacaggaagttgcacaaatggcacagagaggtcccagtacccttcccccagctttctcccacggttacatatttacacaactgtagtaaaatgtctaaaccaggacattgggcatcggagcaaggtgtatagagttcattgtcattttttatcgtgtgaaaattcctataaccactaccacaatcaagattcaaaactatgtcatcatcccagatatctccttgtcccacccccttacagccacagcagccccttttccccaccattcataactgctggcaagtactaatctagtctgcatctctatacttttgtcttttcaggaatgttatatgcatggagttatacaggatgtgactttttgagattggcttttttcgttgactatcctgcccctgagatccacccaagttgtggtatgtttcagcagttgctgagtggtattccatggtatgggtatacagcagttagtttaaccatttacccattgaaggacaggtttgggttgtttctagtttggcactattaaaaataaagctgctgtgaacatttgtgtacatattctcacgtggagtgatttctctttctaaagtggcatgtgtgcagtggttcggaagtcacagaaatggtggctgggagaatgcttctgctgtcgctggtccaaggagccacgagaagcccttacccagggccctgggagtgggggattgagagggaaataggcaggcctgggtgcctggaagtggggctggtgacggagatccttgcagggtcctatggatccaacagtgggtgaagtgataaccaaatgctagttgttctgtattgtggtatatactgtggcttaagaactacagaggatggccctgagagctgcaaggttcttgattatcaaagaaagattacgttgttataccaagctattcttcataagaattacagtaggaggccaggcgcggtggctcacgcctgtaatcccagcactttgggaggctgaggcgggcggatcataaggtcaggagatcgagaccatcctggctaacacagtgaaaccccatctctactaaaaatacaaaaattagctgggtgtgctggcgggcgcctgtagtcccagctacttgggaggctgaggcaggagaatggcgtgaacctgggaggcggagcttgcagtgagccgagatcatgccactgcactccagcctgggcgacagagcgagactccgtctcaaaaaaaaaaaaaaagaaaagaaagaataaagaattacagtaggaaaatagaactttttaaatttttactatttttttttttttgagacggagtctcgctctgtcgcccaggctggagtgcaatggtgtgatcttggctcactgcaagctccgcctcccaggttcacgccattctcctgcctcagcctccctagtagctgggactacaggcgcccgccaccacacccggctaattttttgtatttttttagtagagacggagtttcaccatgttagccaggatggtctccgtctcctgacctcgtgatccacacgccacagcctcccaaagtgctgggattacaggtgtgagccaccgcacccggccagatttttactattattattattattattgtttaatatagagttgaagcctcaccatgttgcccaggctggtctggaactcttgggcttaagtgatcctcccaccttcggcctcccacagtgctgggattacaagtgtgagccatcttgcccagctggaaaacagaacaatttaatgaaaaaaatgtcggcagcaagcattgagacagagggtgattgtgagaatctgcttttaatcacaatagttagttgatttaaatatcgcatgtcctgggtactctgaagctttagtgtgatgaaaggttcacttgagtctgtggatcactgaatcgttgtcatcgttagaggaaaaagtgttttggtaggttttggtagggggagtcagcaaggtgaaatgtgcaggactgtgtgctggtcctggccagcccatgtgcaaatagcttcactttctaaagggatatcagaatggtgctttgggaggaacttgaatattgtggtgaaacactcctaaattcaaatctgagccatgctgggaatttggacaacttccttactggacaacttcctctaagcctcagtttcctcatttgcagagcggggatagtaatatgcttctcactagttgttataagggtgttgataaatgtgtacctcagagccaggcccactctcatgcctctagccttatctgcctgaagcccgtcttccatacaagtgtcaaatgatcattctgcagcttttcatttaacatgtgttgtttaatcagtttttaaatgtgaaatatgtacatttgaaaaacagaatagaaagttataatgggaagaaagtttctcatttcccactatttctctacttgccagcattgtgtatgtgcgtgtgtatgcgtgtgtgtgtgtttacgtagctgggcattatgtgttctcttcttcaacttggtgtatttcctttctgtatcttagacatctttccacattgatacataaagtccttgcattctgttgaatggccttgttgtacttctgtgccataatttattcagtccatccacagtgtgcattttagattacttctagttttttgcctgttacaagaagtgttacaaacatgcttgcacaaatatgtttggatacttgtacacgtatttgtcagatacacttagagaattgtgtttgccagtttaggatatgcagttaacatttttattagccagatctatattccatctaaaaaaatgttttaccacttctcagctctcactgacgtgtatgaaagtgcctgtttcctcatgcctcggtcgatactgtgaacaaacttgagctcaggtcttgcctcctccaggaaacctccttgtagcgttccctcccagttttgagttgctcatagcctggaagggaggcagaccctacaaaggctgtgacagtgcagcctggcgggcgctgctgagtgcacaagtggcaaggagggagccctgtgctggacggatggtggcagcacagcctgggagctgagggggaggaaccagcaccggctggtgtgggaagtggaggcagcgaatgcaggctttagtgtattgctaatgtggtttcatgaagaattcttgtacttcccgatttgtaaaactgttttctgagccccagttgatggtccattttgttgaaatatcatctcaatagagttgactcatgaatagctaaattacacaccttctcaggtggccttaagtttctttctcttgctctcacaaagcccaaacttgacagagaaggtggctttaacaggttttcacttaggtgacttttttctcctgcataataagggtaccttattttaattttataattattttaaatctttttgtttgtttgtttttgagatggagtctcgctgtggcccaggctggagtggcacgatctcagctcactgcaatctccacctcccggttcaaatgattctcctgcatcagcctcccaagtagctgggattacaggcacgcactaccacacccggctaatttttgtatttttagtagagatggggcttcaccatgttggccaggctgttctcaaactcctgacctcaagtgattcccccacgttggcctcccaaagtgctgggattacaggtgtgagccaccatgcccggactattttaaatcttgagatggaattacaattctaaaacctaatatgagtgaatatactccccaaatttaaaaaagttaacctaatattgtcatagtccaaatataggttgaaagcagttatagcagggagagttgcagagttggtcagcagggttgagattgatctgtcagtcccaacgtggacacggggtcctgaatggggggtggctctgtgccatgaggtagttaaggaatccagctggtgggcagctttccatctacagcatgtgacttccatctctgggtctgtgacagctgatccctcagccagcagcaaggaagaaagattggagggcaagcagctttctgtaaagaaaaataaaagtgatctggaagttgcatacatcacttctacccacatcttattagtcagaacttggtcatctggccatacctggctgctgggaaagctgccaggcgtcgtctctagttgggcagccatttatctagcaggaaggggaaggaaggcttctcttatgaaagcgaggaagggagggatggatcctggagcacctcagcgcctgtgtcgcacctctgatgttttgacggcttccacagccctcaggactgaggccagacggctctgcgtggcttctggggctcatagtgatctggcctccttttctctctccagcttcactcgccctctacccagcaagtccctagtgacttgtcacattccgaatgtgcctccgcctctgctgcttctcctcccattcccccaaatcttcttcaccctactgggtttaggacccttggtgtgcagggcctcctcctgagtgtgcgctcactgagggcaggcgagtgtcctggcatggtacctcaccatccacagcgggtgctcagtacatgcttgcaagtaactgtgttgctggtgtgttgacggcatagcagaggaacagccaccctccgtaaagcaggtggtagtgggtgcctgcctttttgctgagttgtctctaatcctttgcacttgtaccccgctagccaagctcagcagttcgctgtgtctggacacagtcagtttgagctctgtggctctactgtccatctctggcaaaagagtctgagggcggatgccgcctcctccttgaagccgtccttgtcttctgcccctgccagtgggtaggatctcttttgccttttgattttgtttacattgtgcttatggcccttaccgcactgtgacttgtaatatagataatggactcactgctcgcgcttctcccccaaatagtgaagtacatgttgtttcaagactggttgctagctgactatggcatatcttttgctatacttaccactttcgtgcataaaggtaccccctaaatgttgagtggaattgtttcagcctcttgcaaactgtaaataagctaatctttagaaaggatcttcctttagatatcagtaaaatggagcagcactgtggggaatcagatcaacaaaggtttattgaatgctcacagtgccccaaagaccagcttcctgtcctcctgtccttggagtatgagatgccatgagcaagacagacctgcctcgcacctcctatagcttagagcacagtgacctgccagcctggagagctcctgagtccccttctcacagcagtgtgggctaggcaggtgttccagctcactcagccctagattgctcccaggtaacacgggactgagactcctgcggtgcgggttgtatgagcagctgtttgtccagcatctaagcgctgtggcgtcactggagtcactccctggctggcacgctaacacacctcggcaggagtggtcagagtggcagccacactgcagccaccacccagaggacggggagaagaccgtggggcagtggtcacttggagaaattattaatttgactcagttctttatttagacttgttattaatccattttttccatgtttaaggaaaatcctagcatttgtgttgaaatataaatcatcaccacaaaaatctcattaggttgacgttaaatattagatactagaacataaaggcaagggatttgacagagctgtagaatacattctgtagtcttaaacggtatagaatgtttacctatatgattttattgttggctatgtagttttaaaagaccaaaataaatagcttgctgacttttaaataagcataaccagacacgagcctaggaaccacttgccaatttgtttgcttgttttctgtataaaatcatccaggctcctgcagagcagcagtctcagcctgtgcctcaaccacagaaaagctgctttctgggcctgctggcctacactcagacatagtggatagacttcctagtgttactatgatggactgtcagtcacagcagagttcttcatatacagatctctaccctgaagtccggtggtgatgtgggactctggggctgtgccagctgatgccagctctgggacccacctcctgaggcaggagcacgtgcttgggcacatgcagcacactgatgccaccaggcctctgacagcctgtcactttggcgtatgaatcttgctttttggttcatcatttcaaccagaatctatacactgagcagaagactggtccgtttgcttctctttaggcattctagaagtgatcatttttgaaacaatgcctccgtctctagacagctaggtgtaaatgaaccatttacacctagcttgcccacagggggcaagctgatgagacgcacagagtgatgtagtcttttcatagccagtagtaatgcatacattcttttctccaaaggtggttattttctagtccagccccttaaagtgtggtcttgctgggcctcaaaattccttcctttcataatggtctggtaccactgaaatgtctgcatttttttgtgtcttgcttaagttcagaacttggtcagattgactttatcaacttacagccacattgtcttacataccaataagttcagaactctcttacgtgagctgcgtatgtacttccggtaagaatgcacgttcattctgtttttctttgaagggatctgaaacttgcccacccttcgggatattgcaggacgctgcatcatgagcgacagtaaatgtgacagtcagttttatagtgtgcaagtggcagactcaaccttcactgtcctaaaacgttaccagcagctgaaaccaattggctctggggcccaagggattgtttggtaagtatggtctgttttaatagcgtggattgagtttttgctgtaataaaaagtaaaactaaagtgtcaggatttagaaacattgatgattaaaaaaaaaactctgttataggtttatgagctaaattgaatcaactgcttgctctagttctgtgtagtcaggctgtagggtacaaacccatattcttagaatgctgcaggaatttaaataggtagcaagttttcttttttgtttgtttctttttcctttcattttttttttcatttctcctgtcattatgatatcagagtagtaggtatgacagtgagttgtaacagaaatttggagttttattcatttcttcatcatggccaccttttcccccctccccttttattcccgatcactcctgttcatttccaggcgccatcattgcagtgccttgccattcattggcaggatgaggccagtcagtgtcattgtcactccatggattaaccaggaagggatgctgtgtgaggggttgggctggccatctcttccttggtgtctcacttcaactgtgtgtccagcccagaacgtcagaatcgttagtctgaccctgaacgttagtctcttgcatggtaagacggtcagccgccgcagcatcacgggccagctcaaggtaaagctcttcacatgtttcctagactgcagctatcagcacttcccacactttttaccccttatttttctgggcagaacttttttttttctttttctttttctttttttttggtcaatgaaaacaggattacctttgcgcctaaagaaaccgtggtgcagttaaacatcgcgtgtttacagctggtaggcagagggggttgagggagaagaaagctcttttcgatgctctagtagggtagtttacatttccttgtagagatgttgggtttggagaatctttaacgatgatttttaactgatcctttgttgcggagacctatgatcagggaaacagttgtttttttcagccctggcggctgaaggccctgggagctaagaggaaattgcagtccagagcttctttgagaagctaaggcgggaaagggactgtttggaaggaatgcccagcttgcatctaaagtaatggtgatcttaacttcctgatgacacatgctgtatcggcacttaaatccagtgtgccagaagaagtgttaaaggtggccgggcacggtggctcacgcctgtaatcccagcactttgggaggccaagctgggcagatcacgaggtcaagagatcgagaccatcctggccaacatggtgaaaccccgtctttgctaaaaatacagaaattagccaggtgtggtggcacacacccgtagtcccagctactcgggaggctgaggcaagagaatcgcttgaacctgggagatggaggttgcagtgagccaagatcgcgccactgcactccagcctgggcgatggagcaagactccgtctcaaaaaaaaaaaaaaaaaagttttaaagttagtggaggatggttcaaattaggaaactttgatggtaatggaaagttataaacaacaaagcattcttttggtttataacccatctcctatttggaattagatgataatttgacagataatttgatgtgtgcatgcgagagagagagagaaaaaggagagagggggcaagaagggagaaatgtcggaggtcttggggagttgtttgtggctatagacaggtagctgttttatttatttatttatttttttgagacagagtctcactttgtcaccaggctggagtgcagtggcgcgatctcagctcactgtagcctccgcctcctgggttcaagcagttctcctgcctcagcctcccggtagctgggactacaggcgcacgccaccacacccagctaatttttgtatttttagtagagacagggtttccccatgttggccaggatggtctcgatctcttgacctcatgatccacccaccttggcctcccaaagtgctgggattacaggcatgagccactgcgcccggcctacaggtagctgttttaaatacgtgcttcatttatcccagctggcatgtcattcacttgcttttgaaggttggtagtaatgtgaatagtgtatattgtagaatcaccatgagctctgccataaccctcactggtggtgaatcgaaggactaggaaggctcacttgcttctcccgtctcacggggtgttagtggtaggcctgggaccaaaacaagctgtgggcctttgggaccttattgcctgtaccacggagagacttgttgaagactttgaaccactgatactttgataggtcaaggcctctgacccaccttctgtttagaatcttagtaataatgaacaaatattcactaaacacctattaaacaattttcatttaattgtatttatctctataagacaattgttacattcaagaacagtttcaatttttatagctataactgactttcagttttatggtatccttctatcttatgttctaatagggaaagtaaacactttataagtgattttcgcttccttttcacctttctcttttctctgtatccttcaccaggctatgaggcaccaagtagaattgggaaataatctagttacggcacattcccgtttcaaaaaagaaaaaaaagcttgcttttccaaaaataagctcaacagtagattagctaacactgacaagaggaattggattttctatcatatttcgtattaaaatattggcattatgtagttaattgatgatctgaaacttcctttcatcactattgtacttgaaaatcatctgtcagtgattctttggggagtgtagcatgcagaataatggtcccgcctgagatgtccacgtcctaatccctggaatttgtatatttctttacatggcaaaaggaatttagccggtgtgattacattaatggtcttgagatgggagggttatcccaggtttagttgggtgggtccttcttacaaaagggagacaggaaggtcatagtcagagatgtgatggcagagcgaagtttggagtgatgtggggccacagccaagcaatacaggaagcctccaaccagctgagagaggcagggagcagactccccccagagcctgcagaaggagccacgcagccctgcttacctcttgaggcataagatgcattttggacttctcacctccagaactgtaagatagtaagtttgtgtggctttaaagcagtaaattggtggttacttgttacaatagcaataggaaactaattcacaagcatgtgtatttctacatttttgagaaatataacagcaacagtgtatggtttatgcaactagttaatcttctatttaaattagagctttatgaagggcaggtgtgcagataaaccaacgtgcaggtagggcctgtgacctgtacaggattaaatggaagagctggagccagaagaaaatattctggttcctaattttgaattgtttttatagttgtctttgatttgtttatttgtttttgttcctttaaatatgttagtaaaatttattaggaaataagtttttaaattttaaaatattttattttatttttgagacggagtcttgctctgtcaccaggtggagtgcagtggcgtgatcttggctcaccgcaacctccgcctcgcgggttcaagtgattctcctgcctcagcctcccgagtagctgggattacaggtgtgcgccaccacgcccagctaattttttgtattttagtagagatggggtttcaccatgttggccaggatggtctccatctcttgatctcgtgatctgcccaccttggcctcccaaagtgctgggattgcaggcatgagccaccgcgcctggcctaaaataagttttaaaatataattttgaagtattcataaatatcaactgtgttatagtacaattaaataattgtaagattttgaagctctagtggagaaaatgtatgtacatttctttcatacatatattcagtttttctttctccttcaaaaatctcaagtttggccaaaatagtaaagattatttgctttacgaaaccattctatgaaatgcttaacctttaaaaaagtgttcaatattgagtctggcggttcttagaagtaacagttacagccttaacatgaaataattggtatagcgtgttcctttttgtgtcctcaagttctgtataaacatgagtactggcctgttcttaacatggtttattttctattaatataaataaataaaaacataacaatgttcacaacaaaatttctgtgataaaggagacatggtttgaggcacaggatggctgtgattcagaagacttgagttctgagtccagctcttttcctcagcgaagagttctttgtgagcagggcaaatcagtttctttatgggcctcaatattttcacctgtaaaatgagtggtttggaacttctcatttaagatggtggcccgaacacctgtacaaagataagagggcagtaataagtggaagacagttttaacaaatttatgaaatatagaaagtagcttgaatcttgtgatacagataaaacagcagataaagtgagaataagcagctgaagtatgtgcgtaaggaagagaacctagctatagtaaaactacagaggctgtgggcatagagatgacaatgaagaagagatgaaatgagtggctaaaactagggctgttaattaaaagtgtgcctgtgaaacagctgtgccagttttctgccaacattcccactgtcccccatgctcagcattttcccctagagagctagtaagttagtgaggagttactaggtcaggatctggggaagcacagaagcctagtgaggggagcttcagcatgtggggctgtctttcccttgggggcatttgaaaattctggaaggggctgttgagagagtgttttggactgccctgtggctaggagacagggatgagagtccagggccctctaatattgtgtggcaaacttcttttacttgtgttgggaccaataaaaggctgcttcctagaagtaaaggtaactcagagattggcccttataggcactgccactcagcttcagattatcatctcatttgctgaacttgtatgggggtaaacaaaaattgctagtgcccccaggtacctagtagaaataaatttaaattctttgtggaagaagacagcatcatattagataaaattatttctagatagcaaacagttttatacgtgcaaggcccagtctaggcacacaaggagatatgacaacatgaataaaatcctgcagaaacagcagacaaaagaaacagatccataggagatattggcattattagatccacatttttaaatagctatgatattacgttcaaggtgataaaggcaagattaaaagttttggtggagaaatgaaaacttcttttaagaggaataaatcaaaattctagaagtaaaaactatagtaattgaattatgaatttaatatgtgtaacagcatgctagatataactgaagagagatttagtgacctggaggagaggtcagcaaaaagtatccagaatgaaagctgcagaggcaaaaatggtagaagagcccaaaacagagaaggtgttagttttctattgctgcataacacattaacacaaacttagttgtttaaaacaacacctattgattatctcatagttctatagtcagaaacctgggtgggtttgcctgggttctttgcccagcatctcacaaagctgaagtcaagatttcgactgggctgggctcagctcacagatggaggttctggaagggtatctgcttccaagctccttcagcctgttggcagagtctagttccttacagctttaggtctgtggttcccaatctcttgatctctttcagtcaggcgctgctgtctgctcccagaggctgcatgttttccttctcaagtgacctcctccatcttcaaggcagcagtggcatgcccagtccttcccatactcacatctccctgattttccaccctttccatgagccagagcaaactctgcctttaaagggctctcgtgataagaataggcccacctggataatctgcgttttgttaaattaatgagtacgtttagcccttttgcaagatgcagggtcagtatatgtacccctccccctgcaaaattgcatatttatatactagcagcatatagaaaatgaaaatttgaaaaggataccacttaaaataggataaaaacttttaaattatcatatctggaggaaaaatctaacaatatgaaagacttgtatacaaaaagctaaaaaaattagaaaaaatagagaaaactgaaatcgtggtgggatgtctgattttcagagttagaatatttaataccatgaaggtcatttttcagacttgtctagagtgattgcaatcaaatctcagtcgtcttaaaaaacaaagaaatgaacaaactgattttaaaatttatatgtaaaaataaaaaccctagaatggtcaagacacccattaagaagggaggaacactccctctgcgagatgtgaagacttaccataaaactggtgatcaagctggtgtcgtgtggtgcaaggagaaacagtggactagccctgaaacagagtcatgcatgtgtgggcttctgacttatggcagtggtggcctgtggagcaatgaggaaaggctagccttttaaataaatggacataggaatgttcatgtagaaaaaagtgaaatttgaccccaacctcatattatacacaaaagtgaatgtcagttgaattgctgtaaatatataaggcaagccagtaaagctatttgaacataatataggagaatgtcttcatgatctttggggtagggaaggactcctttaaacacaacataaaaaaacatttatctgctggatgtggtggctcatgcctataattccagcactttgggaggccaaggtgggaggatcgcttgaggccaggagttcaagaccagcctggccaacataatgagactccccccatctccactttaagaaaaaaaaaaattatcatagaagattgatcaattttgtattaaaattaagaaatgttgtttattttaaaaaaccaagatcaagaaactgaaaagataagcatagatgtgagaagatatatgactgaaaaaaaatctcttgttcagaatatgtaaagaacaacagtcaagaagattataaagatagacaaacaaatagtcaataggttgtcacaggaggatacccaaataacctataaacaggaaaagtgctcaatgccgttattcatcaagatagtgcaatttaaaactgcgacgaaataccattccacactcagcagaatggttagaaactaagctgttggtgataccaagtgctggtgaggatgtggaaccacccagaggcagctctcagatgtgacccctcgtgtactggaaccacgcagaggcagctctcagatgtgacccctcgtgcactgctggcagctgtacaaatttgtagaaacgctctggcaaagagtttgacattatctactgaaatacaatggatacgttcccactcttagttgtctactcatcagaaacacatgcataggggatccggagctgcgtacaggaatggtgatgactgtgtgttctgtaatagattgaaaactaaaaacaactgaaatatctatcaacgtaatgtgatatagttatacaaaggaatcttatagcaatgatggaaggagttatagctacatacagcaacaatggatgagtcccataatattgagccacagaagtcagacacagaagatttcaaaaaacaggcaaaaataaactgggagctccagggtgcatgctttagctggtaaagcaagaaagtgattattgtacatgtcaaagcagttatcactggtggacaggagggacactaattagttgggggtgtgagaagcttttgggatacagagagaacatgactgataaatcattgagctgggaaacaaaaaaagaagcaaaggaatcagtacagtatcgggcataagcctcctcactgtcagcactcagtgtggaaatcagtggaaaagtgccttcaaagttctcacagaaaattgattttaaactcagaaaacttattatcaatcaagggtgggggcagagcaataccatctatcttccatgcaccttttctgaggaaattccttgaggatgtactccagcaagagaggcaacacaagagcgtaatgcaagaagcagtggggactgtgaaaagaaatcccaggatggtggctgcatggcaggtcttaaggaagctgcaagaagagtgtctgcaaatcatgtggaggagatgccagacaacaataatgtaagaagctaggaagtgccagtgataggctaaagagtgtctgcaaatcatgtggagtaggtgccacacaacagataatgtgagaagctaagatgtgtcaatgataggctaaaactggcattttttattagtaaaaactaataataatctagaatgtaataaaatctattatttattagaaatgtgtggggaaaactagaaaaaatcatggtctaattatgaaacaaagaggacatgatgtttgagcagttgatgaaatataagagaatcctttgtccttgatcctggaaatagtctcaccctcttatgagtggcagcaagagccatgtgatctttagaaaatgaaatgtaatcccaactctggccgttagtgatatttacattgtacacatacacacctacactccatgtattgattttcaacttctagaaacatcctaaagaagaaatacagaagacttagttatgaatatatggtaaatggaggagaaagggatggaacagtctcattttacgtaagcagaagtcaagacgttcccttcagagttgaagaagcgtgaagattaggggtgttacttaaagacgtaaccagggaaaacccaaaaagcagaacaacaaaaaaaataggaggtgttggcgattggggatttcaaggaagtggccaaatactcagttttcgtaatggggagtaggtgaatcatttctaaagctgataaatgaagagatagtgataacaatgtattctttgagtgaccgcaataaccacaaccaggaataactgaaggtagttcctcatggagctgagctacaagtggggaagcttatgcccacttagatgcttagacttggtccatttgccttgttttagccaaaaacttttttaaaatgacaaataaaaattgtatatatttatcatgtccagcatattgttctgaaatatgtatacattatggactagctaaattgagcgaattaacatatgcattacctcacatactttttaaaagtttctgatgagaacaaatctactctcatcaattttcaagaatacaatacattgttattaactgcagtcaccatatctcacagtagacctcctgaccttattcctcctatctaactgaaattttggacaaaaacttttgataccaaaaaagtgtgtctgttttcaaattctttttttctttttctttttctttttttttttttttgagaccctgggcaacagggtctcagtctgtcacccaggctggggtgcagtggagggatcagtgctcactgcagtctcgacccccggctcaagcagtcctcccacctcagtcccctgagtaactgggtctacagacatgcaccaccacactcagctaatctttgtattttttgtacagacaaggtttcactgtattgcccaggctggtctcaaactcctgggctcaagcgatctgcctgccttggcctcccaaagtgctgggaatacaggcataagccaccacacctggcctattttcaaattcttgagtctgagaagtatataggtataaatacatacatggctacatgtatgtcaatgacttgtttcacaagtggatatatccttctcattttataattcatataaatggtgcaatttgcatatgaacctgtggatttacatatgtatatagacagacacataatatgaactgaattaaagtaaggtagcttcttaaccaaatgctacaacagatagccttcaactttaaaacagattgaattaggttcgagtttggcaaaagcattaatagaagagaataaatgtaaacaatgttataaactcaatggaataaagaaatagaaacagtatttaaatcagtgcttaggttctcaggtggcctttagtagctgttagccctcatgagtagcccagaggtgataatacaaatgatactatttagtaccagtttgaaacctaaaaatgtgtaatcaggctacttgattcttcatgtctattttctggaggaaaatgaacagaatttcaacaggaaacgagatgctggaaacacagcctgtagattttattcttactatagtagtaggaggagatagttctaaaagaactttatatagcagttgcttacgttagagattttgtatcttgaacatttaccatgagctgaaattttggcttcttttctttttagatactgttatttgtgaaaaaaacacagtgattcaaaatttagatttattctcctcatgaattcagccatttcctctactgtgatattccaaaatatacacattttaagacaggaaacagtgactttgtttccaacttcttgtcatgtttaaactgaagatttcatttcttgactggttttatgcactctatattaaattacctggttttgaatgtaatctaaactatgaaaccttggtgtgtgaaggattgctgaaccccatcttaactgtggctgaaatgtgcctctgcaaaggagttagtacatgctgtagtcttagacaactcactctgctcttcatatgtgcaagtaccttgaatgaaataagcagatttttccttgttacttattaaaaagatgatatattcaatgtatattctggcattgctgtattttccaaaaccgttctaatggattgtgcattatatttcctaattctagtgctgcatttgatacagttcttgggataaatgttgcagtcaagaaactaagccgtccttttcagaaccaaactcatgcaaagagagcttatcgtgaacttgtcctcttaaaatgtgtcaatcataaaaatgtaagttatgtatgtattttgtctgtgtgcttccatattgtcaataatgtggtaatcttcagggttttctggagatacattgagttcagacctaggataagctaaggataaaaatggctattaacattggttttttgttttttgtttttttgtttttttgtcgcccaggctggaatgcagtggcgcagtctcggctctctgcaagctccacctcccgggttcatgccattctcttacctcagcctcccaagtagctgggactacaggcgcctgccaccacgcccggctaattttttgtatttttagtagagatggggtttcaccatgttagtcaggatggtcttgatctcctggccccatgatccacctgccttggccttccaaagtgctgggattacaggcgtgagccaccatgcccggcctattttttattgataacattctttttttttggagacggagtctcgctctgtcgcccaggctggagtgcagtggtgggatcttggctcgctgcaagctccacctcccgggttcatgccattttcctgcctcagcctcctgagtagctgggactacaggcgcccgccaccacgcccggctaattttttgtatttttaggagagacagggtttcaccgcgttagccgggatggtctcgatctcctgacctcatggtccgccagcctcagcctcccaaagtgctgggattacaggcgtgagccatggcgcccggctgataaaattcttaataaacattgaggaaatcaaagctagaaagaggcatcattatggtgcataggaatttaggtcacttaaccaaagtaggaatatcaattgatactctgtttctataaaataggaacagtattgatctaacaaattgagaaacaactaaatattttgtggaaagatgttgttctataagtaggtttttaccttgtatatgacacaccagtttcaaatacacgttattagatgatgttacatttagagtagctattcttggaagctccacagaaatcaaagcactaaattttacggagaaataatgtttctagaaaatgaagttgggttcaatcaagcacattgtttgttctcctagtggtcgctgagcattatgttgataacgttgccatgttataaaattacaaaatgttggccgggtgcagtggctcacgcctgtaatcccagcactttaggaggccgaggcgggtggatcatgacgtcaggagatagagaccatcctggctaacatggtgaaaccccatctctactaaaaagtacaaaaaattaaggagggtgaggtgggagaatggcatgaacccgggaggcagagcttgcagtgagctgagatagcaccactgcactccagcctgggcgacagagcgagactccgtctcaaaataaataaataaataaataaataaaatataaaacgtgaaatctggttttttttgttttgtttttttgagacagggtctcattctgtcacccaggttgtgattctcccacctcagccctccaagtagctgggaccataggcgtgcgccaccatgcttggcagtttttaaaattgtttgtagaggtggggtcttaccaccttgtctaggctgatcttaaactcctgagcttccttcttttgagtctgtggcttgagttggtttaaatttctctaatgcatgctttattttactttttcttttttttttttttttttttgagacggagtctcgctctgtcgcccaacctggagggcagtggcgcgatctcagctcactgcaagctccgcctcccaggttcacgccattctcctgcctcagcctcccgagtagccgggactacaggtgcccgccaccacacccagctaattttttgtatttttagtagagacaggggtttcaccatgttagccaggatggtctcgatctcctgacctcgtgatctgcctgcctcggcgtcccaaagtgctgggattacaggcgtgagccaccgcacccggacttgttttacttacttatttaaaaaattttttcaggttacaaaaaatatatattatttttaaaaattcaaacaatataaaaaagtaaaaactcctgaataccgccacccacagattactagcattaacagtttggtgagcattcttatgcatacatgtgcacaagtacataaacaagattaatcgtgttattcttcatcctgcttttctcctcgtgcaatgttggtagacctcatatactttaatgaacatagatatgagccagtttttaaatggttgcatagcacagatgcacagtaatttatttaagagactgccagccgcctgttgttggatagattgttttgtttctcactgttataagcagtgctgcaatgaacattctaacgcctgaatttttgcatactcgtccaggtgaatttcttggccaacattgtcaggtcagagtacacacacttctagtttaaaatatactgacaaattgacctcaaggaagactattagtttgatattttcattaagagtatttgagaagctgggcacggtcacttcacctgtaatcccagctacttgggctgaggcaggagggtcgcttgaagccaggagtttaaggcacacctgggcaacaaaacaagaccccatctcctaaaaaaaaaaaagtatcagccgggcgctgtggctcacacctgtaatcccaacactttgggaggccaaggcaggtggatcacctgagtcatgagtttaagaccacgttggttggccagcgtggtgaaaccccgtctctactaaaaatacaaaaattagctgggcgtagtggtgggcgcctgtaatcccagctcattgggaggctgaggcaggagaatcacttgaacccaggaagcataggttgcagtaagccaagattgcgccattgcactccagcctgggggacaagaatgaaactccatctcaaaaaaaaaaaaaaagtgtctgagaacgtctgttacttcagaatcccccagcactacatactgttgattttttttgttttgcttttgccaatttgataaataaatgatattttatttttattggtgaggttgttacttatttttatgtgttttggtaatttaatttttatggcctttatccatttttcttttggactgctggtctcttctgcatttgtaggagggttttttttttaaatattaaaactattgccctttacttttttttttccatttgacattatttatgttgttgacatactgattttttatcacccattttttgtttcattttaatgtaatcagatctcttaggtttcctgtcatgtttagaaaagattttctacgctaggattatataaatgtttatctatattctgaggttttatttcatgttttagatttaagtctttgttccatttagagtttttcttggtataaagattgaaatatggatgcagttttatttttgtccttagctaaccaatcaccccaatcctgtataatggataattcatctttccctcagtcatctggaatgactgaggttatgtgtttggtgcctaagccgtgggactcgctgtttacaccatgggctgtgtactggttcgttcccgcactgccataaagagatacccaagacagtgtaacttataaaggaaagcggtttaaataactcatagttgcgcatgatgtgggagacctcaggaaacttgcaatcatggcggaagacgaaagggaggcaggcaccttcttcacaaggcggcaggagagagaaaagtaaagagcaaagtgggcagtgctccttagaaaaccatcaggtctcctgagaactcactcactgtcacaagaacagcacgggggaaaccgcccccatgatccagtcacctcccaccaggtctctccctagacacgtggggattatggggattacaattcaagatgagatttgggtggggacacagccaaatcatgtcagggtgccaggatggaggcctgccgcaggatcagctctttaaccctctttaggtaaaaatatgatgctacgaggcctttcactttatcacaccaaaaacaagagcttagccttcatatttcaaacctttttagaaatttgtgcgtagtatttaagttttcagagttaacatactgctttaatgtctttttacctgtaaattctacttttttatgttcaaaaagacattatgtgtttaaattctgtaataattaagttactagggacacataaaagtgatttgattaaaagtgcatctttcctttaattgatgtttaacttttctcaaatgccatgtaattggtaaaagcagtaataataagaagtactgaattctgctgtgatttttttcccgtcttaatgcatttcaatattaaacttaatttttgtaatcaagtaatctgacatattgaagtataattaattttctcttttcagataattagtttgttaaatgtgtttacaccacaaaaaactctagaagaatttcaagatgtgtaagtatcatttttattcagtaatgcactgtacatcaaagaatgaacatctagaaaagacagcaactgctttttatacttaggaaatgtaggtggcaatacattttgtgacatcacagataactttctctgttgcagagaaatatttagaaaatttgatagttatatttaattatttgtaccacatgggttttcatcttcataacagataaaggatgactggaaagaattcttcagagcagaccaggatcactaatgtgttttgctgaactataaaatgtttttctcaaatccctgatagccaggattttagggttcaggagtttatgagtattacttaaaatgattaagtcactaattctatttaagattctgtatttccagaatcttaagtagaatcatcttactaacagtgaaatgaagtattaatctattgagaggcataatgcccaacttcatcctgaatttattggtgtgttcagtcattaacaaatatctgattgccctctgtgtgctgggcactctctgggacttggcctacctggcttccctggagcctgtcagggaagatagacaagccacatgataaatgaggaaagcatgtagtccattagaatgtgctaggtgctgtggacaaagggtggagctgggtcaggggatcaaaagtgctgagggttggacttgaggctgcagttttaaataaggtggctggggaaagacctccatgagttggtgacattcgaagaaagccttgaaggggataaagaagttggtctggccgggtgcggtggctcacgcctataatcccagcactttgggaggccgaggcgggcggatcacgaggtcaggagatcgagaccatcctggctaacacggtgaaaccccgtctctactaaaaatacaaaaaatcagccgggcgtggtggcgggggcctgtagtcccagctactcaggaggctgaggcaggagaatggtgtgaacccgggaggtggagcttgcagtgagccaagatcgcaccactgcactccagccagggcgacagagcaagactctgtctcaaaaaaaaaaaaaaaaagaatttggtgccgcagatactttgggggcaagtagaatggagatagaaggaacagacagcgctcaggacagcagtggatgcccgcctggtgttttccaagaccatcaagaggtggcgtggctagagatgagggagcaggggaagagaagagggtgaacaccacaagcctctaggccgttgtaaggatgtcttttgctctaaggcaagtcagagtaagagtcttagcagagcagtgagctcacctgccttctgtttgaaaagcgtaactctggcatctgggttggtaacccactataaggggtgggggcatggaacatcagttactgctgttgcagcagttctgttaagggatgacggagggtccatttggcccagaggggtaataggaagggtgagaggggaagagactggatgctgaaatggttctaaagatagagccatggtattagctgatagatgagatgtgtggtatgagagagaggaattgagaatgacacctagatttttggcctgagcacctgaaggatgagggagctctcaactgagatgatgaaggctgtgagaagagcagactgggctagggatggaatcaggagttcagttctggagatggctttaagatgcctgttagacatcaaggtggaactgggaatagggaggcagaggaatgagcctggagttcaggagatatgtctgaattgaacgtaggaatttgggagctgatggcctgtaactgagatcactaagaaagtgagtgtggttacagaagagaagagggtcaaggaccagttgctgggtattttgacagcgagaagttagagacaggacagggcagggcccgctgggattataggactggccagtggatttagcagcatggaagacatcagtggcctcgaggaggacagtttcagcagaatggtggctgcacaaacctgatccaagtgggattaagaaaaaaatgggagaaggctgagtgcagtggctcatgcctgtaatcccaacactttggaaggcccgaggtgggcggatcacttgaggtcaggagttcgagaccagcctgggcaacatggcaaaaccccgtctctactaaaaatacaaaaactatccaggcatgatggctgttttttttttttaatttaattttcagttctgggagtccgaggcatgagaatggcttgaacccgggaggtggaggttgcagtgaggcgagatcacgccactgcactccagtctgggtgacagagtgagaccctgtctcaaaaaaatttaaaaaataaaaagaagggagaagaattggagatagcacatgagacacctctttggggagttttgcttgcaaagggagcaaagaatcggggcgttgctaagcggggagtggggtcaagtgtcctttttgttgttgttgtataatcacttttaaaaacgtatatattgtagagcaatttagagccacagcaaaattgagcgggaggtactgagttcctgtctgtctccagccccttacgtgcagagcctcccccgttctcagcatctcccaccagagggtacatgtgttgtgattgatgagcctgtaacagcatggtctttaggctggtacggagaatttcagccaaaaatgtaagaagtaggaaaatttgtgtttgagattctatttaccatgctataaaaggttgttgtttttttttttaatttttaacttgtaagacgttaagtttgttatttatatattctttggaaaatttttagaaagttccattataccaagttatctttttactttagccagtgcagtgattggaagtaagttacagtttcatgaaatttagtcataaaggaactttggataattttcaaataaataactgaccttttctccctcaggtatttggttatggaattaatggatgctaacttatgtcaggttattcacatggagctggatcatgaaagaatgtcctaccttctttaccagatgctttgtggtattaaacatctgcattcagctggtataattcatagagtaagtggtgatgtattaattttatttttaaaaacaatcatttggttgtcataatcctttacatacaaaataacatttaaaaaaaattgttaggcttgaaaatccaaatagatgatggaatcatatggtgttttaagagagtcattctaggaggcatctgtggagccgcctggcctgccaggctagaccagctgctgtggacacagccaggtactgcgctctcagtcagatactgcgcaagaatacattgttttaaacttttcattttaaagtaacttaaaacttagagaaaaatttcaagaataggacagagaacttccaactaccatttatctacattcacctgtttttaatatatttgccatatgtgaaatcccatttttaatgagcaaggaacttaaaggccaagtagtcagtgagacagctgcttgagaactctctttcttaaataatgacccacatatccatttctcttatcctaaaattctgccgtgccagcttccctgcatcactggtgggagtggccagaccctgcaccgcaagggttcagagcaggcctgtgggctcagcagaggccgggatttgaataacagtgtgactgtactgtcaggaaaaacatttaataagctagggagcgataatataattaatataattctctctaagctgattttacaattttttgttattattacttgtacggctgtgtaagcagactatcatgatagatttttttttttcacaatttgataccaatacttcagtagcaaagaaaatgaaataaacttcttcctgccaaaaaacagtacatttttcataaaaaagaaagatggaattgatgtaataggtgaagaacaattaaaacttgtcaaataaggccagtaagaaaaccccaacagttaacaaaatctgttttcaatgacatattacagaacaattaaaaagctacataaaaatcagtgttacctacttattagaaatacattttaattcacctgtagatccaaaaacatttagacatacagacaaaattttgtattaactgacaaaaaaacccacactacctattggattcatgttgcttaaagggtatctacagaattctcacctcaatattttcgtgttaaataaggtggaaatcaacagtccagagatggtcattagaaatgagccactgacaaacacaatatatttataacttgtataacatttcattcatgtgcatgttttgagcattgtggaatatttaatttgcatcaggctttccaaattccttaaatttataagatttgttctcagtgggagttctcagatgacttttgaaataattattaaaatgaaaatttatttgcaaactactagggtttagatacagaataccttcttgtatttaaagatccatctccagtttgcatacatcatgtctttcaatgtgccggagagaaacaaaggcatccccacgttctttacatttatagggttttttagaaatgagttcttttatgtcttcaagtagaactggaaagactgaagacactaccacattgtttacatgcatagaatttttcctcagtagtagttttgtttcgtattttcaaagggaaatggaagagttccatgtgctttttaatgtgctcagaggtaactggaacatataaaggcatcatcacattcctcatatgcatgttatgtaaattatacggttttcctccagtataatttctttcatgttttcaaagataactgaattaactgaatgttttccccaaatccttacattctcaggatttctacagagtatgagttttttcatgtttacatacaggactggaatatctaaaggctttgccacatgccttacagtcatagggtttctctccagtttgagttctttcatgtttacatagagaactggaatatctgaagacttcaccacattgcaagtctgaagacttgaccacattccttatagtcaaagggtttctctccagtatgagatttttcatgtttacctagagaactggaatgtctggagacttgaccacattccttacagtcaaagggtttctctccagtgtgaaatttttcatgtttacatagagaactggaatgtctgaagacttgaccacatcccttacagtcaaagggtttctctccagtgtgagttcttccgtgtttacatagagaactggaatgtctgaagacttgaccacattccttacagtcaaagggtttctctccagtgtgagatttttcatgtttacatagagaattggaatgtctgaagacttgaccacatcccttacggtcaaagggtttctctccagtgtgagttctttcatgtttacgtagagaactggaatgtctgaagacttgaccacattccttacagtcaaagggttcctctccagtgtgagttctttcatgtttacatagagaactggaatgtctaaagacttgaccacattccttacagtcaaagggtgcctctccagtgtgagttctttcatgtttacttagagaactgaaatgtctaaagacttgaccacattccttacagtcaaagggtttctctctggtatgagatttttcatgtgttcaaagggagctggaatgcctgaaggtgttaccacattttttttttttttttgaaacagagtcttgctctgttgcccaggctggagtgcagtggtgtgatcttggctcactgcaacctccacctcccaggttcaagcagttctcctgtctcagcctcccaagtagctgggattacaggcacctgccaccaaatttggctatttttttttttttttttttttttagtagagacaggatttcaccatgttggccaggctggtctcgaactgctgacctcatgatctgcctgcctcagcctcccaaagtgctgggattacaggtgtgagccactgcgcccagccacattttttatattcataaggtttctctccagtatgagttctctcatgtgtttggaggtaactgaaccgactgaagcctttatcccatttttgacattcattgggtttctctccagtatgagttctttcatgtcttctaagggaactgtgttgactgaaggctttgccacattttttacagttataggatttctctccaatatgtgttctttgatgtcttcacatggagcggggatgactgaaggctttgctacatttcttacatttatagggtttctctccagtattatttcttttatgtttctgaatggaactggaaagagtgagtcttttaccatatttcttaaacacatggaagatttttcacattgtgagctctttatgtctttgaaagtaactacaaaaactgaatcgtttcccacatttcctacattcacggggtttctcttcagcatgagcacctttatggttatgaaggtaaccagaatgtccaaaggctttctcacatttctgacatttataaggtttttccccactgtgagttcttttatgtttttgaaaataactgcaaaatctcaaggctttaccacctttcttccattcacagggtttttctccgttgtaaattactttgtgtctttgaagtaaatagagaaacttaaatgtcttcccacatttcttacatttatgaggcctgttaccagtgtgtgttaccatgtgtctttggacatttgtgagagaaatgaaggttttctcacattgtttacatttgtatggcttcaccccacgtttctcccatgcatgtagtttgtgtccagaatgagataagatgtgcctattaagggatgaaggacatgtgaagacttgtccacacactctgcattcacatgaatttacatcagcagaaattttcttcttcaggttcagatttggaatctggccgaatatttctccacaatgactaccttctttacattcacagagtctttctcccataggacttcataaattttttccagaattattgaaatgactttcactgttctggtcttcccatttgtttccatttcctggcttccaggattctatggcatcctgcttagggatctccaaggtcacagggtgacagtctgtggcagagccacctagggcctcctggcccgaattttttctaaaaaacaattaaaatactgagtgagactagaggcagagataatataattttatcggaaatagatattcttagcattccctggattattactatactaattttatcaacagattgccattagattttatgttccaacagcaagaggtcatctttttgctgaactgaaatctgtggggaagaagctagtgagagacaagaacagcagagcctgttactacagaaataagcagatgggttttagatggtggagtggtaataattttttcagatctcttttgccaggaaagattggttccatcacagccattgaaggcctcccttgggggtagagcccaccgacccacagagggcagggttgtctcgtctcaagcctcaggtctgtggcccaagggcagcgtcagggatagctcttgtcctcccagggctagctgacagcctcccatctgccatctagtgtactgttttttaaaatagaacctttgctgccatcagatggtcagttaaaataatatattggtgactttgctttaaaaatagtaacactaggcttctgaattaaagatctcctgatgtaccattctatttctgttcctgaagtttccacagaccttcatataatttaaggtactcttgatatctcttaaatacattttatttatgctttagaataatttcccagattattagtcttactacattaggccttattcattttataaggggaaatggtttgtctgacttgttcccccttgggccccaaggtaagtgggaaacaatggcctcctgtcactgggggctttgtgagagctgcagcgtcggcaggccttttttatggaatagccggtgcctgcagcctgagtcagatggggcccaaaggagtgtttggtttgcccagcacgaggtatagaaacctaagaagccttcagaaaatggccctgttgccatccctgcctcctgctcaccatccccacccacctggcatcttgctgtgtcctctcctccctgtcaccttgttccctgctgcttcccacatccatggccttgccaggctctccccacatctgtgtccatgtgggagagtgatgcatgctcactgtggggaagttccaaacattgcacaggtgtataaagcaaagggggaaactccctcttgccccctgcccccctgccccacccctgcccacatcccaggaagggaggagccctaagttaactgttctgtgtggactgcaccatcctttgttccatctacagtaccatgcacagagatagacacacttttaattttgcctattaaaatggtttaatacaaaacataaattttaagtatttgaaagataaagttttgcccatgatatcccaccgaagtatatactttatataattcaaaaaatgaaatgcaagtaacccagccctctgttagcacctggagatggccagtgagagcacgctggtgcatgtcctgcctcactctgcatggcacctctctgttgactgatgttaacaccagcatatctgtacttatgtccttttgaacttacatccttcaaagacaggatcaccttgcatataactgcgtagcaacttcctaaacaggtagcttggtttgtttttttaaatcaaggatcaaatatttctataaatatttatgaaaaacagatacctccacctctccctttatttctctctccctagaagcaaactccttcagttcatttagctgattattttggtctctatttccatattgaaataatatgcttagctctttcttcattgatcctttctcagtttggggcataagatgctgatttagcttcttaccaacccagccctcaccctcggccttcctcgccctcctcccaggctggtggatgtgatggtgtttggctcgttgcgtcatcgtgagcgtgtaaatgctttgcacagcagaccttcccctttcaccttttgttccctggagttaacaaacacttatactctatttgtgtgaggtttttgtttgttttggggggtagtttctgtgttcttggtggtaattcaaccctaactcttccatcaggcatctgaattttctctcagcacatgtagatgtcttgggtatttcatcagtttcatcttctcaggaacctctcccaagcctcagccctgttcccctttgcactggctgccactgcacctgctcgaaggggctgtcctggatctcccttggtgattttgtgggggtttccttcatctgcctcccatgttggattccttgcttgctgtccttgtctctcagattacccccttgttttggtgggacgcatcctccaaaagcttcctaaattgccacaggggagagaaattttttgaggcctcaaatgtctgaaactctttattctgccctctcacatgatgagtagtgtggttgtgtgtagatgtgtgtagaattcttagttacagatcagttgcgctcagaatggcggaggcagtgcctgtggtagcaaggcatctagcatggctccggagtttcttagtgccatctgatgtttttttagatggagtctcgctctgtcgcccaggctggagtgcagtggcatggtcttggctcagtgcaaactctgcctctcgggttcacgccattctcctgcctcagcctccctagtggctaggactgcaggcgtccgccaccacgcccagctaattttttgtatttttagtagagacagggtttcaccttgttacccaggatggtctcgatctcctgacctcgtgatccgcccgcctcggcctcccaaagtgctggattacaggcatgagccactgtgcctggctgatgactaaccttttttaagtgctgtggttttgggttttggtttggttttatctctggaaacttttaaactcagttatttattccttgtattctgagatgttttgatgtatgccttgatgtgggcattttttctttagttttgctgggcacttggccttcagtctggaagcacatattatagaggtctgagaaatttatatcatttctttcagaatgtcctcttaactccattctttattctttttctctgaagcacgagttaattgacactcatttgctcttaaaagttcctttttacagcattctgttcttgttgcatgtatatactatcatctctgaggataagcttttgttgaagggttttatcactccctgcattgtctttctctactgagagttccctttttagtgtgttaggtccctccctgtcacacgcaaggctttccccaaatgtctggttggatcatgtttaagattgaaacattaggccaagcacggtggctcatgccagtaatcccagcactttgggagactgaggcgggcagatcacctgaggtcaagagttcgacaccagcctggtcaacatggtgaaactctgtctctactaaaaatataaaaattagctgggcgtggtggcaggtgcctataatcccagctagtcaggagactgaggcaggagaatttcttgaacccaggaagcggaggttgcagtgagctgagatagtgccattgcactccagcctgagcaacaagatcgagacttcgtctcaaaaaaaaaaaaaaaaaaaagagattgaagcattaaaggctgactggaagtactgagtgaatgggtaaattgttaaagaatgggtgtctcttggaccacaggcagccacaggtgtcaccttctgtaggttttttctctgggcaccatttaatttctctggaaaaggccccttcagtcccttggtggagggatgtaagcctggctgctggggtacagggctgtgcttctcatgtggcagagcgcaaactcaccaggcagccctgttgcaggcaggcctcaccgtgccttccctgttggtacccacaggactgtgcatgcggcgcctgtggccctgcacctggaagctgggcatcagtttctctgcgtgaagggccagcaggagtgaggaaggagtggagcctcacttctgggatggagatggggatctgggacatctactacgtacttggactttcaataaaatgaaaacttctccaagtgctacccttgcctcttctgcctccatagcacctgcatttcacttgctgagcctttcctgggtgtcgtggccatttatagaggttggcatttccttcgctcagctagggcatttgggcggccctgcagcttcctgtccctgtagcgtggggcttttcgtgggcggcttccgcatgccacggtgggttagacaggcgagggactggccgggaggaggcctgtgcgagaaggaagggggagcagccagaggaggcagcaaatgctagctgaacgtagtgcagtcctggcccctcagaggcctggtccagactgcggtgcagctctgagggcctccggtgtcacacaggaacgggcctgcctcagcatccctgcccggtcggcccctggctgacggctctgtgggaggtgtgccctggcagggacagagggtaggtgcagacaccacactgggccatctgtcactctcactcctgtggcgggagaccaaggagtgcatttccgtggaccccacagtccaccctggccccctcagctctacttctccacataagttgggaatggctttcctgtggcgcccatggttctctcttcctcaggggaaatctggaagacagaggttagtgggacaccctgtagtccctgtcactgtggtctctctgctggctctttccctaccctttcctgttattcataccctcagctctcacattggcaggcctctgtggcttgcctggcctgtgtcccaggccttcattcctgagccgtctgtgtctggtggctctcagtgggccacagggtcccaggccacccagtggccgtctccccagtcctcagtgtgtagccggagcggaggcgcttggcaggtggagtaacgcccacacgagttccttggcctgtgagtaagagtcgtcacagtgggaaggccaaatggaaacctgaaactgcccccaagatagtaaatcaaaaacaagatcacaccctgcagggcccggggtgggtggaggagactagggccaccatggaagcctcaggggagcagagacagtggtatcttgcatcccagtctaactcgttagtccagcccttgaagaagctgcatggattctggagaatgaccccagacggccacaggcttacggcactggcagtcctggccgcagctgctgtgcatgtcaaggtgcagttgttgctggagcagattaataaggcctcaggtctggcatgttgatggggcaaatgcatcctccacactgattagaagagaggcccagacagcgcccacactgctgcaggctggacagcaatgttctctcacagccttgctctaagcctttgctaacgttcccaccctcccataacatggccgcaagagacctggcccagacttcacttatgccctgacccctgacccctgaccccacgaaccctgcaagtggaggagccctgagagtgtttggggtcttcgggtttcagtgtctacttagagctgtgtccattcatcctcaagagtgcctggctgttcttacccggtgggtggccacaggtacctgtggggaaggaccggcaaggccagacagtggacacctgtcatgatgtgctccttcctgggatacctctcaagcagtgggtctggatcccagagttgagcgggcagtgggggaggtcagcacctgccccactcatgctgcgggtgctgtgggtaccctcactgctgcccacagggtagcgttgggttccaggcattttgggagccaagccccgatccaggcgtcacttggatctgtacttggcatttgtcttctttgttctgagtgattttcaagacttgaaggggcagaactgtctttcctctgctgtcttgaaattgaagtgaggtgttgggaagctgcctcaggttgtatttcgggggtgactagagagggtcccagggtgcggggagagcacctccttagccacctccccattggccacacagagcacccacacaagcttgggactttatcaccacagtcttccagcagacggcagtaaagtgtgcttttcctgttaaattagtatgtgatgacagttttttgacagatggcagtgtcttcagatgagcgtgtttctggcgcactggggttcacagagctggcaggcagcccgtggagatggttccactgctgcgtctgtccttggtagaaccaggctgtccttgtcttccttgctcctgcggccgtgctgttagttctgggtgggctgggcttcagggcctgctggctggggaagtgtgtgcatttcacacctcagaaatcagcctcctggagagaaagtgcccactgcacaccctctgtggcctgaggaagcgcctgtttctgcttctcccgccagcaccgagtctgcttgctttccatcgctgccaagtgatagactaaaaatgggcattcattttgggtttttaaagaagatttttgtgagattgagcattattttatctgttagtaatttatgttctaaaatgcctgttcttgtcatactctttgattttaaaaaaggaaacaagaagcgaattcgttcatttggtcttagctccctgacttggtcctcacagcggagcgtccctggttgaatgtgggctgcttctccctggctttccttcatgcagggaggcagcccggtttcttcctctcaggcctttctgggaaccgggggtgtctgcacagtactctaaggtggaatggaggggctgggggcctctttttggggccaggtagagattgtgactgcatttttaaacattatatgtttatcatttaaatcttacagaatctaggaagcctagaaacaggtcacttagcagcatggcagtgtaattgtacctgttgtcaatgtcgaaatggcttcctgcttgccctgatgacagccccacagccttcactgaggcatgccgcctgcaaccccccttgtggcccatcagttggggtgtcttacaggcaggtgctaggcagtgctactgaacctgcaacttcctgggtaaagtatcctcatgccttacgccatgtcagtggcttggcagtttgacattgcaggtgcactactcttgtgaaaagaatgggtgtgggttgtttacaagtcacagtttctcaagtgagtttgcaggccgaagtccccaggcaaaagtcaaattcctaaggcctgaggaaggggctagggtggaggatcagcaggaagaaaatcccttagttatgagggaaaaggttgcagaagttgtgttaaggctttgcaagtcaggtggaatatgatgcatgtcttcattctgcagacacttcccaagtgtctgctcgcgccaggcgtgcttctgagtgctgagagctcacacagagtcagcactggggagggaagagaggtggcaaccagaacatgagcaggtgagtttttgtgccacgtacagatggagacagcagcaccagtgctggcgtgtctttgtggcgaaggtgagaagattggaggtggatgatcatggaattgctcttccaaggagagaaagagccatgggaagattccaggatcagacgattctagacctgtgctgtccagtatggcagccactaaccacaggaggctgtggagcactcaggatgtggccgtgctgcagttgtaaaatacatactggacttcaaaggctcagtactaaaaagagaatgtaaaatatctcagtatttttcttatgttgattacattttgaaatgataatattatggatatattgggttaaaaaaatatactgtatgattaaaattaatttcacctatttctgcatgctgttgagcatggctagtagaaaatgtaaattatacacatcgttcgcattatatgacattgtctgtgggacagcactgccctggactgacagacagcatgaggaccttagcaagagagagtcagagtattggggaactcaagtccaggcgtggagagcaggagggggccgtgtgtgctggactgacagcatgaggaccttagcaagagagagtcagagtattggggaactcaagtccaggcgtggagagcgggaggggggcatgtgtgctggacgtgtagatgcatggatggagggtagataggacagcctgagggcctgcgagaccacagaaagggcaaatgggggccatgaaggtttccactgggggtaaggggcaccatctgacggctttaggctgatttgttttagtttcaatttgagagtaagattttccaaagttgttcccaaatctcagagttcagttcactccctacactctcacactggcttcacgaccctcacggatgtgaagtagtttatttagcatgcttcattcattttactaatttaagccatttctttcctaggatttgaagcctagcaacattgttgtgaaatcagactgcaccctgaagatccttgactttggcctggcccggacagcgtgcactaacttcatgatgaccccttacgtggtgacacggtactaccgggcgcccgaagtcatcctgggtatgggctacaaagagaacggtgagtatagccggggctggaagaggctgggatgtttagaaattgctctagcggtggtctcgagttttttctctttcctttgaaccatatgatatatactgtggggactgttacacccagaatatagcatgatccagagataagaaataattaattgtgtttttccattggttaaaatcattctcttttaaaaattcacttttaaaattgttatttttgaactttttaatcagagttaagctgtctatagccaagtgtgcaaatcctgagtgtgcagctcagctgaggtgagcacacccacagcagcagcagctctggcctccccatggcccctcctcgcagcccacgaggctggccaatctcctgatctccagtaccatggatcagctttatttgttggtctgcatattgtttttttgaatttgatgtaaatagaataacacatgttttcatgtaaaattggtgtctttttacatcaaaacttagcttattctagcaatatcagagctctttgaaacttggcttttagcaaatttgttgaaaataacgaaatcacgcttacttatttttaaaaagactgaaagtttgcccgggtcatctgaaatgagttttgctacaggttcatcttgctgcgttgtagcttgtgttcccaccctgaggggcacagcttcatgtgcttcctgtggaggggagagaaaacttgatcccctgttcacttctcccctcggcccgccagcagggcacttagaggcctctgctgtctgtctgaggccccacagatgagggtgggcaccgtggaagtctgggcccctctagcagggcctcacctgcagtcctgcaagccagccagcctgtgccgccagtgagtgctgctgcctttctgacggggcagtctagaaaatgatcgctcaggaggtgtggtatcaacaacgcacagaggctcccgccggcaagctagtgacgtgtaccgggtttgtcctgggagggggtttgaagaaaaaagatgggggactctagctggtttttaatcccctggtgtttggtagtggacatctggtctgtcgggtgcatcatggcagaaatggtcctccataaagtcctgttcccgggaagagactgtatccttcacaggggacccggtacttggccatggaggctggggtgggcgtgtggccctgaaaagctttgtgttcacaggcacttcttgtttctggttttttgtttgtttgtttgtttgttttaagctataaagtattggactctttggcactaaaaccccagattgctacaaaccgaaggctaaaatagaggtcagcaatcattcatattgtgtaaaatgtcacccttagctagcaatttatttttccatatttgtgtgtttagtgcactgttagaattccttttcctcacttttgttttgttcatggcacttcataattttatcatttcattttattttcagttgatatctggtcagtgggttgcatcatgggagagctggtgaaaggttgtgtgatattccaaggcactgaccgtatccttccccgcgaccttggccccgccatgctttcttaatgcctcaggcagcatgaccacctgcttacacgagcgctcacgaggacaaagtcgtaaaatccactccagactgtgttctaaggggggctttactgtatttgttaattagtgtcacaagccaagtggttcaatttcattctttatttttaacttgactacctgtgatgactttgagacttagagttcagttaaaccgattatattagctcttaattttgccaaaaatagctggacacatagaagaaattatttactctttgataagtatattctgatatttaaatgaaaatactgtattatttagtttattccgttaatttaactaggaaagatgctatctaaatttaataggctagtgtgcttgtgtgctttaattaagtactattttgttagttactggtatgcattgaaatattttcccccaaagtaagaactgaagcacattacaaaggacctaagtgaaagagattaaaatgaaaattttgtgaggaacaatatgttaaactttcttgtttgttactgtgctgacattttgtagaattttttttaaaaatctgtctagtgggttattttgtgacacactggggaagtcaaaataaatgtaaaatgaaagagataaactcatactgtagtcagcaagtcatgttagagatacagcagaaaggagaataactactctaattgttacaatagccttctttcctcatttgccattcttccatcctcagtattttttaccctaacatggttcttcacatcttccctttttcatttgtgttttaaccacttagtttttcattagtctttgactttgttttcgttatgaaagtttaaattggtctccatccttgggcagattgatggttgcttttaaggaaatcaagctccatagtcagtgttttgtatgtatcttaggaaaataatttcagattttaataattttatcaaagtggtctccttataaattcttcacagtgcaaacttaaagtgaaaatatttttatttctctcattttatttacctttctttacattttctatatcatagattatataatatgtcaagttattttatttgttctactaaattttctagcagtttccatagcctcatctcagattcacttgttgcaacctataaataaggacgtctttattttgcaagtaaacttaattaaaaagggaaaagttgaaaaattaaaagactaataatttagaaatatctacttaatgttcagtttgtctcaattcttactcattttgtgccattccttgttttattacaaaatgttttcttcaaaaagtacaaaaatgaaaaatgtgagtactttttggtgcattttagtaagtaaaattaaaattcctgctatacatatgaacattaatgtcagtaattaatagtgttatatataaggttacctaatgttattcccaaaagccacacagagtttaacatcattttctaaagaaaattttgccaactctttcaaatattagattgaaatttgggagatagaaaaaagttgcagaaatcagactgagggtctcagagatttgctttaatttgcgacccagggtagaaaaggaactcctgtccctgcggtggtctatgagaaagagaaagctttagcccggccacctcgggccccagctcagactcctccccttggcagccatgcatccttgagaaatttagggcctctctgagccttggtttccccttctgtaaaatagacctgtggtctgcctgcagcttcacgagagttagacaacagggtccactgggcttgtcggaattattgttccccttcccccgtccctctcatctgtcccccatccctcccacctgtaggatgctggggtggagtcctctcggggaatctgtgggtctcctctcacaactggtttaatttctagtcctttatcattaacccagcagatatttctctcacctgcccatttctgggtgcctagtctgactgagatgcaaagaggctcctcccagctgctgaattgagggtggatcgtcaagggcagggcagagcaggagaacagagcagaggctgccatcatccagaggagaggtggaggcccccagcaggcgggtaggggtgtggccggggagatgggcttgtactctgctttgaagctggacccttcaaggagccttgctagggtttggagatgtctgttagacagtggaatttaggggcaaggtctgggatagagagatcaaagtgggtgtcatccgtctgtcggtagccttgaagcctaggactggtagcgagcacttgcaggggaggaagagaccaggacccgggacttagcccccttgaggtggagggacaaagggaatagggaaggaaatggagaaggcactcacgtgacccctcctcctagagtgtggtgactgagggaggctcattcacatgaggagatgaggacgggggattggcccctgggccttgtgatggctgctggcagccatgatgggcacagcatttatggagtggagggaagaaagcctgatgggagtatgtttgagagaaaatgagaggctgggaattagagacacaagtgtagacagctcttttttctttccttttttttttttttttttcctttgagacagagtctcactccattgcccaggctggagggcagcgatgcgatctcagctcactgcaacctctacctcctgggttcaagcgattcttctgcctcagcctcccgagtagctgggattacaggcgcccgccaccacgcctggctaatttttgtatttttagtagggccagggtttcaccgtcttggccaggctggtcttgaacacctgaccttgtgatccacctgcctcggcctcccaaagtgccgggattacaggtgtgagccactgagcccgaccgacagctctttatggaagtttttgctgcaaataggaataagaaataaagcgataggtagggccaaaggaaagcagctactgtgttaacataggagaaaacaccatcatttaccaacgtggtggaatgtattggtagagtgcaaaatgtcgatgatgttggagaaggaagagttgagggagcttgtccttgagtcaggggggttagggtctagagctgagcaggcttagtgtagccgggagcccagatggttgctgtgtggcaaatggcacacagatgctgggtgggtgcatcctgggaagtctgtgggagtgagcaggcagaagaggtatcaaaagtataaggtgggctgggcgcagtggctcacacctataatcccagcactttgggaggccgaggcaggcagatcacttgaggccaggaattccagaccagcctggccaacatggcgaaaccccatctctactaaaaataacaaaaattagccgaccgttatggcaggtgcctgtagtcccagctacttgggaggctgaggcacgagaattacttgagcccgggaggtggaggttgcagtcagccgagatcatgccactgcactccagcctgggcgacagagcgagactctgtctttatttatatatgtatatatggcagaaggaaaaggtgtgagacagttttcacattttggctaaataggtaaataaaatgtgggcataattctgatttgacaatatgtatgaaccaggagtaggaaggagaatttgctagtgaattgaatgccagaaacacatttcctgagcgggtcttttggaagtataacattttggaagaactgagttcatgtaccagttccctaggttatttcatggtgatgtaagttcatttttctaagacatgcctcagtgagcacttttttaagctgctgttgatgctatttttttctcacttgcattctcttgtatagcgagtacagtttcagtgtcactttcccacatgtaatcctaattatcccaagcctaacaagcaccctgtggaataggcaaagctggtaatgtctgcattgaacaaataaggaaacagaccccaaggaagcctgactttcctgacacactgagtgtttaatgcagagttgagtctgaaacccaggtcacgcactttgaaaggaaataaaatgcattacctagggatcgcagtgatggttgggaagagtcagttccaagtaaaatagagcatcatttgaaagctgtcgctgggctcagtctaagcccagttgcttggttcccagctgtaaactgaggaggtcagataggtctctccacaggtcccttgagatcctctgttctttagagagctgtgaatgaatctaaggtagcattagtatgaaaactgatttcaatttgcttatgtaatgtttatctaatttcgtgtttaatcatttttgctataggtattcttagttataagataaactttattttgaactagagtgggaaggtgtgtagacttcattgtgttgatttaataaactgtgatcatagtttatgaagatgcagagtgtgagagttttaaaaaatagtgtaacttggaaacccaaaccttatttgaatattatttcaaaattccgctgctgatccagtggggtggcctagtcgataggtttaaatattattcaagtgatgctgccgcatgtactgtgaatacaaggtacttcagttgtattttcctcaagaaactccttagatattgatcagtggaataaagttattgagcagctgggaacaccatcagcagagttcatgaagaaacttcagccaactgtgaggaattatgtcgaaaacagaccaaagtatcctggaatcaaatttgaagaactctttccagattggatattcccatcagaatctgagcgagacaaaataaaaagtaagatatcctttttttcttatacttgtgttttgtaattcaggtggtgctttcactctttcatgtttgtattctaaaaacctgtgttttgggagagaaagtcattttaggcctgaagtctgaggtacgaaggcactgaggagagaaagcttaaaggtctagaagctttatcctctataagacggcttaattgaagcctttggccaaaataaaaataatcaaatcagtctgaaagaatcttatgttacagttacagcaactggaattcaaaaagttttcaggtaagaagaacacttaatgcagattctagagtcagaagcgatgtgacagttgttcgatgaaaaaggtccttcctccccaccttctcctgcaccctttactacagtgtgattgtttaaggaaaaagaaaagatttgattctgtccgcatgaaggtaaactgtgccttaatcagaaaagccccagtctttgcttattcaggttgtgaactttaattgacaaaacctaggtgagccttatatttaactaagttattgaacttgtttttctttttcctaaataccaatctgtagattaaaaaaaaaagtgtaagttgccagcactgtatacagctaggccagccagaagcatctgtgagtgttttatcctgtgggaatgtgagattgttgtgtggtttgaaaagtctgttctaatttcatttcgatgtgacttagagaaaaatactcccccgtgcctcatgcccacactctgggcagtgccacccgcagctcggcaattgccaccttccttgctgtggtttcccagccttgggccctgcccagacattggtctgaggctgcctggtgctcttccccaccaccctgggagcccaggtttctcttccccttgcagatccagaggcgtaaaactacatttggaaacctggtttgtcatgaaagtggacatttgactttttcttaaaaatgtttgggttatggctgggtgcggcggctcacgcctgtaatcccagcactttgggaggctgaggcaggcggatcacgaggtcaagagatcgagaccatcctgcctaacacagtgaaaccctgtctctactaaaaaaatacaaaaaattatccgggcatggtggcagacgcctgtagtcccagctgcttgggaggctgaggtaggagaatggcgtgaacccgggaggtggaacttgcagtgagccaagattgcgccactgcattgggcgacagagcgagactccgtctccgaaaaaaaaaaaaaaaattttgggttatattcatcttgaacctatcaaacatttctcaaaattaatatatctttgttctatctgtgttgtcatatttagttctttattgtatgattctgtttgtttcatattaacagcattaatttaatatttgttgtcaccctagcaagtcaagccagagatctgttatcaaaaatgttagtgattgatcctgacaagcggatctctgtagacgaagctctgcgtcacccatacatcactgtttggtatgaccccgccgaagcagaagccgtgagtatctgttttgaaaagatttatatagagaggccaggcttatatttccttggatcttgtctgtccgtccagagtggctacatatgggtagcaagttctccatttgggggctcccagttacagaaaggccaagtgttgtctgagacctgggtcgcttgctcttttgctgctggagccccagctcagagtacctcgggaatgaacttccgctttggtgctaccagtctccattttgcaaatgctgctgtgagctcatagtttattaagcatctattctgtgccattggctttggttacatcctcttgtttaggccacttaaccagagaggctgagcaacttgctgaaaaatcacacgtctgtttatccttccctaaaggcattgtagctcctggttcccccgctggaggagctccactctgagtttggtgctcacgtgcgtgtttctgtgtcagcactggtgtgagtgagctttagctgtgagggaaatcactgcgtagtggcaggcttccttcatgccatgagtgaaatacatgtttatgtcatggcctgtggttttgccatcagtttaaacattgttttatataaaaagaatccaatttataagcagacttttataacagtccatttatgagttggacattggatttgggagttctcccatgaagaaaatgtaaaatttgttctaagaaacaacagtaccttccatagctgccagcacagtgccttgtccataatgggtctctgggaaacagcctgtgatgatgagtttctaatgacatctgggcagatgtctgcgttttgaggtcaggtgattattaagaggaacataataactcttctttggttaactttttcataattattttgattctaaagttgatataatatcacatgacaaatctttattaaaccacgtgttgaattaaactaaatccatatcataaatagactagaagtcttccaagcaattttaccttttttagtgcctcatttttttttgaggcattactgttgactttacatatgatttaatttttagccaccacctcaaatttatgatgcccagttggaagaaagagaacatgcaattgaagaatggaaaggtaaagatggagcttattttgatccttccttttgacatttcttccaatcctgtagagcagaggcttttcattttgtgacatttcccttcaggaaggggcaagaaaccctgcgacccacttagcctctttctccccagtttccagtagaaaatgaacttgaagagaacagagttagagaggaacatttatgaatttcttatcatttgcttcaagagggaaaaataatatttttttcatggcttttcacatattgatttataaactgagcttagtaattgtatcatacttatattgattgatatgtttttaagccatgtagttgtacatatgttttaaaatctagtttgggggaaattgcagattgaaaatatgcaaataggtattattaccactataagattaaccaaacaacccacaacaaactatacctgtaatgaagaggttgaactaacaatttttcattaagaagcaggatcagtagtaactgagaaccacagtcagagtcagtcaacactgatgagggtcatgccccagggccatcctggggtgtgggagtgccggttacctgtgtgtgcccgtgctcagcagtgcatgcacacagcgtgctcactggcctcagtcaatgctcactggcctcagcgaatgcttgcaacgtgctaatgttggtttatgaatactgacattttaggaatccctcatcacttacttcgtaggtaattagtttttcttacagatgaaagttgaggaaaaccgaagttgaaattaagaaaagacttaggcctgtggattcatttctggccagtgtggggggctcctagcccacatgtgggtgctggttacctttggagaaccccaagtaaccacatagagaaacatattcaaatgggtgtgagaatatccaatcccctacagtgttctgtgggagccactccacttcataaagcccccttatggatccagaaccaccctacatgttttgctgccttactagttgcattgaaaaagatgtaatgtagtccaggcgcagtggctcacacctgtaatcccaggactttgggaggccaagtggggcagatggcttgaggccaggaattcaagacaagcctagccaacatagcgaaaccctgtctctacaaaaactacaaaagttagccaggcatggtggtgaacacctgtaatcccagcaatttggatggctgaggcatgagaatcacttgaatccaggaggtggaggtttcagtgagtcaagaccatgccactgtactccagcctggatgacagcatgagactgtctcaaaaaaaaaaaaaaaaaaaagaagaagaagaaaagaaaagatataatgtatcaaaatatgaatattttggtccaggtagactatattactgaattgactctgtcttacaattaaaaataacaaatcgcaatgcctttgttccagttgatttggaagcagagtttagagatacagtgaaactgtttagaaactgattaagcattttaacttgtatttttattaaagagctaatttacaaagaagtcatggattgggaagaaagaagcaagaatggtgttgtaaaagatcagccttcaggttagtgattgctttaattgattgtatgatatttttctttccctattcaactttttttttttgagacagagtttcgttctgtcgcccaggctggagagcagcggcgcgatctctgctcactgcaacctccgcctcctgggttcaagcaattctcctgcctcagcctcccgagtagctgggactacaggcacgcgccaccatgccctgctaatttttgtatttttagtagagacggggtttcaccatattggccaagctggtctcgatctcctgaccttgtgatctgcccgcctcagcctcccaaagtggtgggattacaggcacgcaccaccatgcctggctaatttttgtatttttagtagagacggggtttcagcatattggccaagctggtctcgatctcctgacctcgtgatccacccgcctcagcctcccaaagtggtggggttacaggcgtgagccaccgcacctggcgtctttcccgattcaacttttataaatggcagcaacatgtgaaatgccagcctggctagcatcagatttaaaaaccgctgtatgaatagccagcctttttggcttgtcatagtggtggtggtggtggatgacattttactgatgtgccaggcactgaactttgttataagcatttctctttcatctttgcaataactgctgtcacctccatttacagatgaagaaattgaatttaaagccttttcaatgttgataaccctttgtactggtcccacccaaaatgccaatctaagtaaaatggagtatggtattctttttgagaaaattgttgatatcattttcccatttttctgcttgatctactgatcttcatagtggtggaagcctctaatgaccaggtagttgtatgatcatgagactctgatatgagtcgtgttcacttacgtctgaaggattcttcctgtttactaaatgaaacgctcacgttatatcattgtctctctcccactcccactgggaagcatgcacacacatgtgtgcggatgtgcagagagcacagcttactttttattcttgaattttatgttcaacatgacgtatgtgtcaagcatctagagattatataacttcagcaagaacttaggtgcttgttaactgagcacacacgtatgactgcagacgtcgatctcagagagtgcatgttgtgtttttattcaaaccagactaaaatatggatagtaggaagtaggatagtttcatttgctttaaaagattaaaatgtcagttttctggagttataaaaccataaaatatacaaggccactaatttttttcctttttctggtatatagtctttatttattgcaaaagatttctttgaaagttgatgctttttttcctgtagatttagtgtttatgttataaattgttacaattcaagtgtctggtgacactggaatcctagtcaggcttaagcttttgtgatactgcattttcagataaatatagctgtgtccttttgatgtctgcttgaaagcagcaggtattttttaagtagctaacatgattatacatggccacatatatgtttagctactgagaaaaaaagaagaatcttgcaaggaaagacataggaatatgggactcttggcccaaagaaagactcaaggaaaagttcagaaagtccagctgactgacttcttgtctatactcatagttaggattgggaaactgcaaaaggacagagccgagaaatggcctgcagtctcgctgcctggatttgcagcaatgtcgtgcctcagattttattatatttggttttcttagcacagatgcagcagtaagtagcaacgccactccttctcagtcttcatcgatcaatgacatttcatccatgtccactgagcagacgctggcctcagacacagacagcagtcttgatgcctcgacgggaccccttgaaggctgtcgatgataggttagaaatagcaaacctgtcagcattgaaggaactctcacctccgtgggcctgaaatgcttgggagttgatggaaccaaatagaaaaactccatgttctgcatgtaagaaacacaatgccttgccctactcagacctgataggattgcctgcttagatgataaaatgaggcagaatatgtctgaagaaaaaaattgcaagccacacttctagagattttgttcaagatcatttcaggtgagcagttagagtaggtgaatttgtttcaaattgtactagtgacagtttctcatcatctgtaactgttgagatgtatgtgcatgtgaccacaaatgcttgcttggacttgcccatctagcactttggaaatcagtatttaaatgccaaataatcttccaggtagtgctgcttctgaagttatctcttaatcctcttaagtaatttggtgtctgtccagaaaaagtcgatttatgtgtattaattggccatcatgatgttatcatatcttattcccttttatgctatgatttattctatcttttgtatttcagaagacatataattaaatctatttaataaataaaaatatatagcttttcttagatttgtgatgtttggggctgagaattatcacggctaaaaccaagacacttatgtggacatcttgttttctttaaactgtcttgtctgggatgattgtacattcagctttactgcacgatacaattttaagttttgcttagtgctgcttgaaatcctagctaccttatctcttttcttcttggtcttctagacttcttatgaatttaaaatgctacctagaacttcaccttctttattaggtgcgtaacactccatcttaattaaatatgatggcagataggttcctgcatccatggcctaacgttggagtggaattttacaaaatgctcactagagatcactgcagtcatttcctaagtgcttcctttgccacagactggcctgggtcctttatttaccttccctcattcactttccctcggccaataccacgttcttgattttctttcttcactggaagaaagcagataaactcctctttggtctgttttcagaggccaggctgattcagatgcctgttgctattgttgctctccattgttgggaggcattccttttcacaagaatgttctgggaaactcttcagaggacgtgaaggaaataccctgaagagtcatgattaactattgactattttctgatttaaaactgctcacctgaaattgatacttttagactttacgatcagtaaattattcagaattcatgaagatgctgagtatgttaagtgtcactgcaggaacggagctgtggtgatcacgttttgcctgcctgtgcccatgtctcttcccttgagcttattctgttgctgattcatatcttgtgttcaattattttggaagcttttcagtcgacattctgtagagtgtgttctgaggaggaactgtgataagaaagtttattataaatattatgtaaaatatatggctctctctgcaccagttatatcttattggttggtcatatcactggaaactggaacctttgattagcaaaattaatattgaaataagaaatagttcttttatattgtgtcatttggacactttcaagtacaaaatggtaataataacttggattgaggcggaaacacctattttatggctatctatctaaacatcttaaaatggccttctctgtaatacactttcttttaaaagacttcactaaatctatctttaaaaggaaaaacaaaagggagaggttgaaaatgcgcgagctgccctgcactgtgtgatgctccctccccgggagacgtggacgggggacgaggcacccgcagacgcccttctgctcactcgctcctctgtgcattcagcgagccacttgccacagatggagcccgtgacggtgtggagggtttcctggaaaggccatcttccaccaggtagaggcgagcgtgcctaggacaggccacagggctccacagaaatacctcaccccagcttcagggttctctctcctgagcctagatttgccagggtcttggtgccacgcaaatggtttcaaactgatctctatggataaatgctgatgttggttaaagaactgaaaaatgtgctcaactgtttcatcttttctattttatttttgtaatttatattgtacacaacccaggaagtaactattttggacatgtatttttataaaccaggtaatttactattatcctggaatttagactaggtttgtttcatttgttgacttagtttccagccaagaaggaaacgactgtctcccccatgtccaggtctcagtttcaagggcagagtccagagagcagacagagttctgtgagagcaggagagcagtctggaaaccctggctgtgcataccgtgtcagccgtgggcctggagatgggagcaggtgagacgcagagccccagtactgagaggaggaagccctcttacagggccccttgcccaccccaagtccgtgtctgaaacacggagcgggtgctgcttcaacccgcatttaatgctgtgtaagtagcgataaccacgtacgagtctgtctggttgatttctaatgtgactcctctggtatttcctcctggtaataaatacaagtgtgacctttcagattgcatatctcaaaagtaacattgctaatgttttataataaaatatattatgtgtgttttggttggtgaaaataatacagactacattttaaaagataaa

SEQ ID NO: 43 - protein, 382 aa, Homo sapiens
MSDSKCDSQFYSVQVADSTFTVLKRYQQLKPIGSGAQGIVCAAFDTVLGINVAVKKLSRPFQNQTHAKRAYRELVLLKCVNHKNIISLLNVFTPQKTLEEFQDVYLVMELMDANLCQVIHMELDHERMSYLLYQMLCGIKHLHSAGIIHRDLKPSNIVVKSDCTLKILDFGLARTACTNFMMTPYVVTRYYRAPEVILGMGYKENVDIWSVGCIMGELVKGCVIFQGTDHIDQWNKVIEQLGTPSAEFMKKLQPTVRNYVENRPKYPGIKFEELFPDWIFPSESERDKIKTSQARDLLSKMLVIDPDKRISVDEALRHPYITVWYDPAEAEAPPPQIYDAQLEEREHAIEEWKELIYKEVMDWEERSKNGVVKDQPSAQMQQ

SEQ ID NO: 44 - protein, 424 aa, Homo sapiens
MSDSKCDSQFYSVQVADSTFTVLKRYQQLKPIGSGAQGIVCAAFDTVLGINVAVKKLSRPFQNQTHAKRAYRELVLLKCVNHKNIISLLNVFTPQKTLEEFQDVYLVMELMDANLCQVIHMELDHERMSYLLYQMLCGIKHLHSAGIIHRDLKPSNIVVKSDCTLKILDFGLARTACTNFMMTPYVVTRYYRAPEVILGMGYKENVDIWSVGCIMGELVKGCVIFQGTDHIDQWNKVIEQLGTPSAEFMKKLQPTVRNYVENRPKYPGIKFEELFPDWIFPSESERDKIKTSQARDLLSKMLVIDPDKRISVDEALRHPYITVWYDPAEAEAPPPQIYDAQLEEREHAIEEWKELIYKEVMDWEERSKNGVVKDQPSDAAVSSNATPSQSSSINDISSMSTEQTLASDTDSSLDASTGPLEGCR

SEQ ID NO: 45 - protein, 382 aa, Homo sapiens
MSDSKCDSQFYSVQVADSTFTVLKRYQQLKPIGSGAQGIVCAAFDTVLGINVAVKKLSRPFQNQTHAKRAYRELVLLKCVNHKNIISLLNVFTPQKTLEEFQDVYLVMELMDANLCQVIHMELDHERMSYLLYQMLCGIKHLHSAGIIHRDLKPSNIVVKSDCTLKILDFGLARTACTNFMMTPYVVTRYYRAPEVILGMGYKENVDIWSVGCIMAEMVLHKVLFPGRDYIDQWNKVIEQLGTPSAEFMKKLQPTVRNYVENRPKYPGIKFEELFPDWIFPSESERDKIKTSQARDLLSKMLVIDPDKRISVDEALRHPYITVWYDPAEAEAPPPQIYDAQLEEREHAIEEWKELIYKEVMDWEERSKNGVVKDQPSAQMQQ

SEQ ID NO: 46 - protein, 424 aa, Homo sapiens
MSDSKCDSQFYSVQVADSTFTVLKRYQQLKPIGSGAQGIVCAAFDTVLGINVAVKKLSRPFQNQTHAKRAYRELVLLKCVNHKNIISLLNVFTPQKTLEEFQDVYLVMELMDANLCQVIHMELDHERMSYLLYQMLCGIKHLHSAGIIHRDLKPSNIVVKSDCTLKILDFGLARTACTNFMMTPYVVTRYYRAPEVILGMGYKENVDIWSVGCIMAEMVLHKVLFPGRDYIDQWNKVIEQLGTPSAEFMKKLQPTVRNYVENRPKYPGIKFEELFPDWIFPSESERDKIKTSQARDLLSKMLVIDPDKRISVDEALRHPYITVWYDPAEAEAPPPQIYDAQLEEREHAIEEWKELIYKEVMDWEERSKNGVVKDQPSDAAVSSNATPSQSSSINDISSMSTEQTLASDTDSSLDASTGPLEGCR

SEQ ID NO: 47 - protein, 242 aa, Homo sapiens
MSDSKCDSQFYSVQVADSTFTVLKRYQQLKPIGSGAQGIVCAAFDTVLGINVAVKKLSRPFQNQTHAKRAYRELVLLKCVNHKNIISLLNVFTPQKTLEEFQDVYLVMELMDANLCQVIHMELDHERMSYLLYQMLCGIKHLHSAGIIHRDLKPSNIVVKSDCTLKILDFGLARTACTNFMMTPYVVTRYYRAPEVILGMGYKENVDIWSVGCIMGELVKGCVIFQGTDRILPRDLGPAMLS

SEQ ID NO: 48 - DNA, 438008 bp, Homo sapiens
agaaatggcgtggcaggggacccagcgagcccagagggattttgccgctgcttcctctacccctgtatttcacgcagctctctaaattgactcagctccaggtaaggtcagaatcttctcggataatctagaccttcaggttccccagtggggctgtgtgtttgggggcagacgacctccctttcccacttccacagtttgggcgctcgtagtatttggggtgtctcctgggtcctgcaggaccctttagagggtccatgggttcttgcggcattcctaatgtattcctgcagtccttctggagcaaaagttcacgatgcaagcctccacacgctgctctgtctgtccgagtgggagctgcagtccagtcctgcctcccgtccgccatgatctctcctttgcaactagcttttaaaattaattaaaaagctatctgttatccaagctatttttataggcaagcttagcttacaggaaaatctctgactcggtcccttgctatggtgtgttgagtttaatgtctctgccaattttcctaattatttttaataaattatcagaaacaaactgaaagaagctttcagacttgcgtgtgtgtgtgtgtgtgtgcgtgcgcattgtatgtttgtgtgtgtggaagagaaggaagtaggaattagggaaagaaaaggaagagggagagaaaattttgttttgttctttccctttttctacagctgcttccatgcctacaataatttctctctcttgcatgcttagagtgaaagtgaatattatgtgtaacccaaatgtctaatacctggattggcactaaccacttaatagatctaattacacactctctcctaccaagggtcacgttagtatatttgggctgcatcttaaatcattcctggctctagcctgttctctgttgtttggttcctaaccatggctttagttcttccttgggtctctgcatgctctgctctagtgcttgatttaataatatggtggaggagtgtgcagactctggagccagatagtctggtttcaaatcctgactctgacacttatcagctataggatcttgggcatctcgtttaatctttctgcatttcagtctcctcacttgtaaaatggacataaaacaaatagctaccttacagggttgttgtgagggttatgtaacagatgtcctgttcatatcgtgttcgatttctcttccatctttgtgcacacaggccccagatgagctgtcatcccccgagctggtatctggtgtctttttttgtcaactcctctctcagatcctgctttggactcgagatctaaaagtacctgggaatttgtgtgccctcccctgtttccccagccttaatgaatgactgccactttaggaatgtaaatactccacctcccttgctccataggcatcaggcacatgggttgcacataactcaggcttgttttacactggggctcctgtgggattgagttatcatccctctgaagtggttcacacctttgcttggcctccttcactttctggtcccaccgtaccactcccactcctcctggaaacactttttcttaaatcactttcacacaaatccttgcctcagggtctggttctggggaagtcaacttaaagtagtttgtttgagttagtatccatataaaatgctttgcatataatatgtcatataaatattggccgttattcttcatgttattaccatgctagtctaaaacaaggtagtttggtgaaggtctcctttacctctctacctcatcaccagaatatatattttactctatttaataattcatcacagaactgctaatataaggctgttcgtatactgggtttctggaaggtttggggataacagtgtaggacataaaaacttaaaaaccgaatgataaaaatgtaatttacttgaagagtcaagacaaccctatttatttgtagaggactctacaaacagaatctggccttgcttccattattagcggtttgtacttctctctgagatcctcagtgggggaagttcctttaagcctttgttaccttgtaaatctccatcctctttagaaaacctttgcctacactccacaaaatctctctaaaacttaactttgaatatgctccctttctttgcgtaattgaggatttggatttacatccaaatggcatgtcagacactaattttatagctttttacaatgtatcagagaagaaaaagaaaataacttttaatggaaagaatacttttgaattctaggactgcatgcattaaaaaagtttggttagccagcattttattttgtaagccaacatcttaatgttctttttgaaagtgctggaacagtttgctttatgactgagacattaaatgtcaagcgtgaacccatatgctgggttgtaagtgttcaaatagctgtattatgtgaaattctagaaaactgggtttgccatggaaatgttgttatagttataactatgggtaggttactgtggttgcatctctgacctaaaaaaagaaaagcactaaaattcataccctaggggtaactgacgaggcagaggcagagataattgaaggatttcaattatttaaaaataaatctctgtttttcccccatttttcagttataaattaatataatactttctgttttcaaatagactcttacatttataaaagatttcagtttagtcaaattttgaatgctgatgagtaatatttagctcaggttttgaagtatgtggtatgaaaaagttgtgccgaaatattaagctttggagtgtctggggttattctggaatttcctactgacagcactgtaaatttagggagataattaaactgtataatactgatacttcactctgactaaactccaccataaatttactaaatggtaagagatatttactgtttgtagttgtaatgtgcaggcacagtatttgacttagtttattagttctctattgctgctatgacaaattagcacaacttattggcttaaaacaacacacatttattatctcatcgtttctgtggattgggagttcaggcacaatttagctagttcctctgcttagagtttcccaagattacatcaaaggatcagctgggctgcatttccttctggagctcagggtcctctttcaagctcctgtgactgttggcaaaatgcaggctcctgaggttatagaactgaagtcttcattttgttgctggcaattagccagggtaactctcatcttccagaggctgccctttgtgcgcctacaacatggcaggttacttctcaagaccagcaggaaaattttgtcctccagtcttctgggatgaagtctcatataatgtaacaatcacggaagtgactatgctatcgcctttgccacgtaatataacctaataaagagagtgactatcctactatgtttgccacattctattggctaaaaagcaagtcacagtttcctagtttcctccacattgaaggagactttgcaaaagcatgcatgacttattgggggtcatgttaggatgggtacaccatacttagtatacccaaaaccatatcatctgttcatgtatcacattgaagttgactagggtcaggttttttcatttcatgtcatggtactatggtaaattgaaatatgagtaaagaaatatattattgaaacatatgagtcactgaaaccattggtggtcttaaataaagcacgctttaacttgaatttatgttctaagtctctaaaataaatgcgaggtaaatgttaccttcatgaccataaagacatttgtagtgttttttggttagtacctgctggtgaactcagagcttcagatgattttgatggattatgggagcaagacattttcacggaggattagatctggagatttaaaaatgacacttggaaaacaaggaacaaaccacagtcagttagaacacgggtccccaacccctggggccacagactggtacaggaactaggctgcacagcaggaggtgagcagggtcgtgaggtgggggtggtgcggtgggggtggcgagccagcgatcctcctctgtatttacagttgcttgcattaccgcctgagctctgcttcctgtcagatcagcagcggcattagattctcagaagcaggaaccctattgtgaactgtgcatgcaagggatcttggttgcacgctacctataagaatctaatgcctgatgatctgtcactgtctcctatcacccccagatgggactgactagttgcaggaaaacaagctcagggcttccactgatattacattatggtgagttgtgtaattctttcattatatattacaatgtaataataatagaaataatgtgcacaattaaatgtaatgcacttgaatcatcctgaagccacctccctgctctgcccttggtcagtggaaaaattgtcttccatgaatccggtccctggtgccaaaaatgttggggagtgctgggttagaagctgtaatggaacaaaatgcccttttataatagtaataaaacatgaaatacctaggaataaagttaacaagaaatttataagatctacatttaaaaagttaaaatattactaaagaacacaaagaatactttgacaaatggtaagacatattatgttcttggataggaagtcttactattacaaaactgacatttctctagttaatccataaatttaagataaaaaaaaaaacccagaattctttttaattagactagttgactctaagattcatatggaaacatcatcaaggaacaatagactagaaaattctgacaaaaaaatagagagaaaatttagggaggatttgctaggcacatattaatatgtatatgctacataaagctatattaattaaaagtgtggtactagtatattaatgaaaaggaaagaaagctgtgaaatagactctaatacaggttggttaaataaaaattggtttgtgagaataagaatgtgttttttttgtgtatgtgtgtttatgtgctaagtatttactaggctctttacatattaacataatctaactcccacaaaaactgtgtgagataggaaccattattattttcatttagaaaaggggaaactgagacatagagagcacaactaacttgcttctaataaatagaggagctgggactgaaattcatttaatcatgctccagagctgacatattctctcattaggctacacattcccccatgcttgtggaattctaggtaggtgtaaaaaagaaagaattaactctatatgtattatactgataatctagataatctagagatacacacatatatgtatttttaagatacacattttaggagaaaacttcaaggaatataatagtgtagtatattaccattgttgtagaaaaacaaaatatataaatgtttacaatacatggtttatcttcatagattcaaaaaagaaaaaaaaagcaccagtgtttgtatcgtgggagaggaactgagttgcttggaaggaggaaggaggaagatttactgtttatgtttatcattttgtgtattttgaattttgtgccatgtacatatactctattaaagaaaataagttaaataacaataacaaaaccagtaaactcagggaagagtattttcaagaacctggtttatacagtatgtgtattagtccattttcacactgctgtaaagaaatacccaagactgggtaatttataaaggaaagaggtttaactgacgcacagttctccatggctccagaggcctcaggaaatttacaatcatggtggaaggtgaaggggaagcaagaaccttcttcacaaggcaacaggagagagaagaaagcaaagcgaagtgggaagagccccttaaaaaaccatcagatctcttcagaattctctcacgatcacaagaacagcatggggaaaactgcccccatgatccaattacctcccaccaggtccctctctcaacacctggggattacaatttgagataagatttgggtggtgatacaaagtcaaaccgtatcagtatatatttacaagtagtttgcttctgcttataaggacagtttatgttacaaacgtttaacatgcaacataaataagtgaaaagatgagttccaaagactgagagaaggtattcgtaacacacagaaccaacaaataattattatttagaatatatgaaggactcttaaacatcaataaaaaaagacaaacacatgggaaaaataaagatatgaacaggtaattcaaagaagaagaagttcaggagaagcacatgaaaagatgatcaaccttattagtaattagggggaggcaaattaaatgagacacagcatttcacacccctaaatttaaaagtttgacagaagtatcagtaaggatggagagtaatagcaaatatcatatcaagaactgctggtgggagtgcaagttggcgcaaccactttggggaataaatataatgcttagcagagagagagatgcctttgaagacctgtgattaaataattccatccacatgtgctcagggagacaagcacatgaatgtttatagtggcatttttttaaaataaaaatatttactggggctatgtgtgtcagctaatgcctgtaatgctagagctttgggaggccaaggcaggaggattgcttgaggccaggagttttcaaccagccagagcaacatggtgagactctctcaaaaaataaataaataaattcttgaatgtgttaggtaatgtaattctcaactattttatcttagaatttttaatgcttggcaactgatacctatggcatctatgaaatggacattgctaccacgattttactttatttagtagttactctagagtatgcaatgtccatttacagctaatccaaatccactttcaaatacatttgaaagtgagctatactgcttcacagataatacaagtaccttgtaacaataatcgagtatttctaattcttcccttctgccctttgtattatgccctccagcgccttactgtcattcatttcacttctacataagctataatcgatcatcaaatacattatttctattattattttgaacaaactgttatctgtgagatcaattaagaataagaaaaattaagatttttttctttacctttacctgttcctttattccttctctaatctctttcctttctttatgtaaatttgagtttttgacctatattatttttcttctctctgaagacattctttcaatatttgttgcaaggcaggtctactggcaacaaattccctcaatttttgtttgagaaagcctcttacacttttgaaggatttcacaggatctgttagtagttttattttccccttctacatacatactttaaatatttaaccctcgtcttttcttgcttgtgtggcttctgagaagtcagatgtaattcttatttttgctcctgtataggtaaagtgttttttccctctggcttctttctgtttttgtttgtttgtttttcagtgtaaatttaaatttttatttttaaccttattttaagttccagggcacacgtgtaggatgtgcaggtttgttacataggtaaatgtgtgccatggtggtttgctgcacctatcaatccatcatctaggtatgaagcccagcatgcattagctatttttcctgctactctccctccccatgacaggccccagtatgtgttgttcccctccctgtgtccatgtgttctcattatttagctcacacttataagtgagaacatgtggtgtttcattttctcttcctgcattagtttgctgaggataatggcttccagctccattcatgtccctgcaaaggaaatgatctcgtttatttttatggctacatagtattccatggtgtatatgtgccacatttcctttatccagtttatcattgatgggcatttgggttgattccatgtctttgctattgtgaataatgctgcaatgaacatatgtgtgcatgtatctttgtaactgaatgatttatattcctttgggtatatacccagaaatcagattgctgggtcaaatgatatttctggttctagatctttcaggaatcgccacactgtcttccacaatggttgaactaatttacattcccaccaacagtgtaaaagcattcctatttctccacagccttgccagcatgtgttgtttcttgactttttaatagtagccattctgactggcatgagatggtatctcattgtggttttgatttgcatttctctaatgatcaatgatgttgagctctttttttatatatttgttggccgcatgaatgtcttcttttgagaagtgtctgttcatgtcctttgcccactttttgatagggttgttttttttttttcttgtaaatttgtttaagtcccctgtagattctggatagacctttgagaaatggatagattgcaaaatatttatcccactctgtaggttgcctgtttgatctgatgatagtttcttttgctgtgcagaagctctttagtttaattagaacccatttatcaatttttgcttttgttacacttgcttttggtgattttgtcataaaatctttgcccttgcttatgtcctgaatgacattgcctacattttcttctatgttttttctagctttgggttttacatttaagtctttaatccatcttgagttaatttttgtaaaatgtgtaaggaaggggtccagtttcaattttttgaatatgtttatccagttctgccagcactatttattaaatccctctggcttctttcaaaatttttctttatctttgattttctgccatttgaatacgatttttgtagttttggggcatttattctgcctggtattttctgagcttcctggatttgtggtttggtgtctgacattaatttggggaaatcttcaggcattattgttccagatattccttcagttgctttctcgctttcttattctggtattttcattatgcatatattacaccttttgtagttgttgtgcagttcttggatgttctgttttttgttttttatttttcagtctttttttttttaaattttcagtttctattgacatatcctcaaactcagattctttcccaaaaacattcttcatttctagttcagtgtttttgatctctagcactttgtttggattcttccttataatttccttccctctgcttatattacgcatctattcttgcatgttgtctactttttccgtttgtgcccttagcaagttagtcatagttgttttaaattcatggtctggcaattgtaacattcatgccatgagtcttgttctgatgcttgttcagtctcttccaactgtgctttctgccttttagtgtgccctggactgtttgctgaaaggtggacgtgatgtactgtgtagcaggaactgctaaaaataagcctttactgatgtggtggtaagatgcgttttgtgcgtgtgtgtgtgtttgtgtgtgtgtgtggtgggaaagggctcaatagtcctgtgattaggtctcgtctttcagcgaggctgtgcccttggtctgtgaacttcacaagtgcttctcggttctccttgcacccatcttaggtgggacaggatagctagagggagctggagttgggtattttcttttctccacatggaaaactagaggggacgggagttggatattttggcttctgcagggtggttaggctctgataaaactctagtaagttaggggctggtaaaatagtttctcctgagggcaggccttgttaagtagagcagaatgctttggtgtatttcaaaatggttactttcacctctcccagctggaaacacaagggaatttttttttttttccattttcactgtgagaagctgatagagctcctggaggtaaaaattgcaaaagtttgggcatcccctctaagactgagtctccttggagttttcaacacaaaaacttatctattcagagctgccagcaattcctcaattctaatttaggttttcctgctggggcactggttccctcagaggtttctgctcagggaagttgtggttctcagtgtccctgtctgtctcttcagggcagtgctttgctctgtgacctcccttctctgatggatcataaaagtgtttgatgttcagcttgtttagctttgccttgttgttagaatggtgtttttgacttctaagctccttacatgctggatggaaaatggagttcggctcagtggcgttatttttattaaaatattgaaaaatctgaaacatcccaaatatcattcggagaatgaataatcaaattatggtatattcatatcatggaatacggtaacacaggtaaaggaatgtactggatttaaataatttaagattgttctatcacagaaacagagtgggaaaaaacagatacagaatgatacacaacaatactatatgttgtttatggatacatacatgtgtaagtacaaaaatctaacagaaaggtacataccatcttaggatagtgatttcttcttctgtggatgtagggaggaattaaataagtgaggaataaaacagagacacccactatgtgagtaatattttatttctaaaaagaagcaaatatttaaagcagatacaacaaagtactaatacctggtgagtatgtgtgaccttaggaaagctaattaacctccaagtgcttatagttttctttgctttcacatagggacaataatatttatctcatagttgccattaggataaaattaactaatatatttttgaaaattttgtaataagaatgtaaataaaattactatgaaaaaagattgaaatattgaaataatttgaaagactttgaaaaataacattatatggattattattgtcacaagttctaccatattcaactcaaagtagaccacataaatctattcgcattctttactctagctgtcattttatttgaaaaatgccatgaatacatctgcttttggtgatcagatgatcaagagaaaatgaaaaaatgaagcattagttgtatgtgttctggaggagtcagaggctaatttagtttccatcgggatttcccagggaatgtacgaatttttgctaagcctttttgatctttgtctacatactttaataactcacaaaaagataccccccagccccttttgtgaccctggattgaaataaacatcttttcaaaatgctagtggaatttactactgtttctattcattaacaaaataccaggaagcagcaggagaggcttccatggggacaatagggggagcctggatgcccctggagtagacagatgcttgtccatcaagtttctcctctgtccctagtgtggatggggtttctgctctgattgacagcctagtccatgttttttaaatcactagagtcttcatggcatgtcaggttgctgtgaccttgcttgaaattgctttgaaaagtacagtgcttttgaatgacttggaaaataccttatgtttaggaaaatgcttgtttctagctttaagcaaaaagaattctacacagtcatatgaactattttaaagccatagtttgaagcctgaaatttctattgtgaaatagcatgtccctggaacatgtgctttgtggctaaaaggttcatatggtttctgtaactacgcaatgcaaaagtaggtctctttgaacctaaactgagagaaactgttgaagcgtgagttactctgtgaactcaatgcttgcagcagaatacgaataagggtattttagcaattctggggcaggctttgggatgaatcagaacattgccctctaggtaaaaaattctctatgactaagtgaaaatgcctagctactcccaggtttactttgtagaaacaagacagtcacacacacattatatacatgcaaacatgcacatgaaaatacatcccatttcctatatctggcaatgctgaggaatgaggttttctctatacaaatgaaacctaatcaattaaatataatagtttaatattttatatgaatctgaaatctttaatctacaccaaacacattttaagtttttcttgatgattcatccatcactattaataattaattatgatgcttttatttctctgtaatgctttgcttgtattcctcctccttccccattactaaagcaatacttgtttcagaaaatcagaaaatacagagagaaaaacatcaattattatatttgttactctgtgtaaatatttccgaacacccactcatatgcacacatgtagttaaggaggaacatgtaataccttttgtggtctgcctttttctcttaatgatttatcatgaatactttttaaaatatcagtggactcataccagaaacatcattttaaatgacatatgccactgtatggacatattctattatattttatttcaataatttcatattggacagttacattcctttttttttttttttgagacaggatctcgctctgtcacccaggcttgagtgcagtggtgtgatcagctcactacagcctcaaccttctgggctcaaacaatctcccacctcagcctcctaagtagctgagactacaggcatgtgccaccatgcctggctaatttttttattttttgtagagacaggatctcacttgcccaggctgatcttgaactcctaggttcaaaagatattcctgcctcatcctcccaaagtgctgggattacaggcatgagggcacctggccatgttcagcattcttatatcacaaacaacactgaatgtacttgtgtgtgttggcatgtatatgtgtataaatatatatagctctatgttccttaattagttccttataatacattattaaatatggaatttgtagttcaaagaacatgcccatttttgagaattttgatatgttttgtcagccagggcaaatattcagctagtatatcctagagacacatatagtctatatcttgtgtctactctggttgtttagtgcctgtgctgttttggtgattaaatatcttgaaatatttatttttgcaaaactatttcagaagaaaaatttgtattcccactcagctttacattttgaggagagatgagaggatttcccttaaatgtttttatatttcttctcatataaaaacaatcacctaaaactcaggaaatgtttgaacagaaattttggggctagaaggctgattttttttcttggattaaaatatataatacttagttatatttggacagatactttaccaaagaagaaatgagttagtactagacacctattggattggctaaaacaaaaaacaagaaacaaacaaacctgactataccaagtaataataagaatatgtaacaactagaactctcacacgttgctggtaggaataaaaaatactacagacactttcaaaaaccgtctgacagtttctttaacattaaacatacacttacaatataacccagcaattctacctttaggtatttatccaagagaaaggaaaacgtctgtctacataagaacatatatgcaaatatttgtagtggctttttcacaattgccccaaattggaaacaacccaaatgttctcatctgatgaatggataaaaaagtggtggtacatccataaagtggaaggctactcagcaataaaaaggaatgaacttattgatgcacataagaatatgaatgaatatctaatgcattaatactgaacaggctacataatatatgatttaatttatattttagaaaagggaaaattataggaatagaaaagagattaatgtttgccagaggctggagatggggtgagaggctgactttaaaggtgcaccatgaggaaacttttagggtaagagaactgataaatatcttaattgtggttgcagctatatgactatatgcatttttcaaaactcatagacctgtacatcaaaaagtgctaattttaccataggtaaattaaaaaggcaaataaaaatttttaaaaatgaaaataaaaataaaaatctatttttaacaggaaaaagaaaatatcatgctgaaacctcttggccaccataagaatgcacattgcagccatcgaaccacagtcagcatgattgaccaaagggcccagctgctggcttgaaatcctttgctgcatttgctagtgactagttgggatactaaagtaggcccattcctgggagtcacggggctccccagtggcctcattgaaacttccttagactacaccataatgtggtatgcttccacccctccctcctttcttcctttgctcgagtcagacttgcatggtagtctgatggttccctcagtcttactggccccctcaatttctttcacacaggcatttcccaaaaaatccttgcatgtttttttttttttttttgagatggagttttgctcttgtcacccaggctgcagtgcaaagacacgatctcagctcactgcaacctccacctcctgggttcaagcaattctcctgcctccacctcctgagtagctgggatcataggcgcctgccaccacacccagctaatttttgtatttttagtacagacaagttctcaccatgttggccaggttggtctagaactcctgacctcagatgatccacccccctcggcctcccaaagtgctgggattacaggcatgagccactgtgcccagcccttgcatgttaaatcatgtcttggcagatgcttcttgcaagacctgaactaacacaacctccaattttacactttataatatgatcatcataaagataaaatgcatgatcatatttttaattacttttacccaatgatctcttttataagcatatttatttaagtataacatacaataaagaaagacatactaaatgtaagcacatggctgtataaattttcagtaagcgaaattgccacccagatcaagaattagaatattagtagtaattcataatccctcctcccccatttatgccctctatcagtgactaattccctcttgaaggtaaccaatgccctgaattcctagcattatagatctgttttgcttacttctgaactttatataagtggcatcattcagcatatactttcatttttgtttgacttttgaacaacatgtttatgagattaaatcatgatagtgtgtatagcagcactttcttccttttttattgttatagaatattccattgagtgagcatagtacagtttatttatgcattttacttttgaggggcaattatgtcttttcccccagttttgtgctgtacagttaatgctgttatgagcatatttgaacatgtcttctggtacatgtatgtatttattcctatttggtatatcactaggagtagaattgtgagattataggttatgcatatgatcagcataaaaagatatgataacaacttttcaaagtggttatactttcagcagctgtgtataagaattcaatttcctctgcaacctcatcattcatacttgatataaaattgacaaagacacaacagtaaaggaaaattataggctaatctttctcatagacataaaatcttaagttattagcaaatagaatctagcagcctataaaagatagtatatcataacccatgatgtgggtttccttgaacgcaaagtgggcttggcatttgaaatatcaatttatgtaattctgcacaaataacagaatacaagagaaaaatcatttagttatctaaatagaagaaaaaaagcatttgataaactataatatcccatcaagatttaaaaaaccactcagcaaacagaagagaagagagcttccttagtttaatgaagaatatccataaaacatctggggcaaacatcattttttttttttttttttttgagacagagtctcactctgtcgcccaggctggagtgcagtggcgtgatcttggctcactgcaagctccacctcccaggttcacgccattctcctgcctcagcctcccgagtagctgggactacaggtgcctgccaccacgcctggcttattttttttgcatttttagtagagatgtggtttcaccgtgttagccaggatggtctcgatctcctgacctcgtgatctgcccaccttggcctcccaaagtgctgggattacaggcatgagccaccaggcctggccaaacatcatttttaatggtgaaatattgaaaactttttctctgatgtaagcaaatacacaaggagatgccttttatcatcacttctatttaatttttttatgtgaggtccctaccagggaaataaggcaagaaaaatataggtattgggaaggaagatataaaataatcatttttctatcttcatatatcttgatatattaactatacaacagtcaatattatatctttatatcacaagtgacatgactggatacatatgaaatccaagagctcccacaactaaattttagaattaagtacatttagctaggttgttgggtacaaagtcagtatataaaagtaaattttatttctacacatcagcaacaaaactattagaatatgaaaatttaaaaaacaattaaaaaatacatcaaaaaaaggctacattggtgcctatactaaatgaccatcgattgccatgtgtttgctgtcttgtcaaagttttgatagttttcctatctcttaactcactgggttgttagctacaatttcttttgctatcattatgcttgcttctaactgtaacttattttagtaattttctgcctcaaatgtgctacgattggaaaatcaataaaaacataaaatgactaaaaatgattgtaataaaactaaaaggattttagtgctcagactttgtgagtttcattttggccacccaggagttactcagagccctttacacttatattcagggtctagtgttgctcaaagtgactgaggttgccagaagtataaactccagggaagaggggttatgaactctccaagttccctgcttgaataggactttcctcaaagttttctctgaagttatttcatcttgaaaggtaaagaaaaaaagaagttgatttcagcttctgtataggaatttttaacaaaatatgattacctttttttgggcaaatgtttggtataaattaatcagtaagtttgtggttagatattgactttgatatgatttaatatacacaatgatttttagacaaagttgcactggctattgttagtcctggaaggttttgtttctaatattagctgaatttggctcagctcaataagtaagattacagccaaataaatactattaactaagtaagcctataattatcaaaactgcactccagaaattgggttttagaggattaattcagtgagcattgagtctatagctgacctaacagccagagcaaaagtgactaatcagaaggtagcctttgctggttgacaggagctaatggggctgcattattaaatatttgagctctagtcatggcctgtgggtgctctgatggcatcacatattttcttttcttttttaaaaaaattattcttttttattaaggtaaaatatacatataaaatttaccatctttgcctttttttttgtgagatggcgttttgctcttgttgcccaggctggagtgcaatggtgtgatctcggctcactgcaacctctgcctcctggatttaagcaattatactgtctcagcctcctgagtagctgggatcacaggcgcctgccacgatgcccggtaaatttttgtatttttagtagagactgggtttcatcatattggtcaggctggtctcgaactcctgacctcaggtaatccgcccgcctcagcctcccaaagtgctgggattacaggtatgagccactgcgcctggcctcatctttgccatttttaagtggacagttcagcagttataactacctttatattctttttttccctttcatcccctggccccttcctggcctctggtaagcaccaatctactctctatcttcatgagattcactttttaagatcccgcatatgaatgtgatatttgtctttctgtggttggcttatttcacttaatgtaatgacctccagtttcgtccatgttgctgcaaatgatcagatatcattcttctttatgtctgagcaatattccattgtgtatatagatcatattttatttatccactcattcattgacagacacaggttgatcccatgtttggttattgtgaatagtgctgcaataatcgtaggagtacagatgtctcttcaatacactgattgcctttcttttggctacatacccagcaatgggaccgctgcatcatatggtagttctattttttgttttttgaggaaccttcctactgtcctccatagtggctgtactaatttacattctcatcaacagcgtacgaggtttcccctttctccacatccttgccagcaactgttattgcctgtccttttgatacaagccttttaactggtgtgagatgacatttcattgtggttttgatttgtatttctttgatggttacttacgttgagcaggttttttatatacctgttggccatttgtataccttcttttgagaaatgtctgttcagatctttggcacatgtttaaattggttatttgtttttatgctacagagttgtttgagttctgtacatattcttgttattaatcccttgtcagatggatagtttgcaaatgttttctcccattctgtgggttgtctcttcacttgattgtttcctttgctgtgcagaagctttttagcttaatgtgatcccatttgtccatttttactttggttgctcatgctttctaggtcttatacaaaaactctttgcccagaccaatggtgcatgatagggggtctagtttcatttttctgcatatagttctccagttttcccagtatcgtctattgaaaagactgtcctttccccactgcatgttcttggtacctttgtcaccatttcttttctgtttagattcatggcgttaaagtttattgactacaactcaatgtcaaatatatattttacatcatgactctatattctgagtcacatacatacacatcaacttgcatatatatagtggaaataaagtttcaatggaaaaaacgcttttctccatgtgatacgtgtggagagtttctattctattgtaatttgttacattttgtttaagaaatgggagtggtagctccctaaattgatttcatggctcattcatgtgtcatgaggttcagctgaaaaacactaatttagatgacttgaagggtcaaccttcctccttcaatgctcccttgaactagagccttggactgggcacagctcggcctagtcgtggtccagcagtttttaaagaaggcctaggctgggtgcgatagttcatgcctgtattcccagcagcttgggaggctgaggtgggaggatcacttgagcccaggagtttgagaccagcctgggcaacatggtgagactccatctctataagacaaaaaaaaaaaaaaaaaaaaaaaagaagaaggcccagactgtgataatattttgatcctggaccacacataggagggaggaaaaaagttaagcaagaatgtgatctcagttgaaatctagtttcaggataattccacagggagttctagagtattaattgcaccaaaaagttgatcatgccttcaggaaaggagtccaaccttttgtattttggtattagctgcaggttggctccagctgggggtcctggagggcctaaaacctcagagtggggcctgcagcatgggggttggggaggcagctcctgttgtccaagggcaattaccaaaagaaagggggcaaatgtgggcatcaatggagtaaagggatgtaggtagggggcatcaacagtgcctgatgcagcttgctccttgcactgctgaaatccacttgcttctcatattaacctccctctgtacaagtgtggtttctccagaattctggctggttacaatttctggaaaaatctacaagaggagggttagtgggacaaactacagcccctgttgctacagttgatcctgagaccataattagtactcattatcttcagcttttaccctttgttctacttcctccctcccacaggtatgagctggctagatggcctttggttatgcaaattaaggattattcttgttggctgcctatttctctttcccagaagaactttatgctttgtttgccatctccattgatccctgtgagtcaagccatctgcccttgttgcccattatggtaactgtgcctatcttgccactgaggattgattgccaccacctggctttgttgttttgggctcctctcattcccactacaagtagtgagtgcagttctgtaacaagtcctatcattggatccagcccttaggccactccctaatgaagttcctgcatggaaatctccatcttagagtctgttttctgaagacccaatttgtgagaaacaaaaatgaaatcctggctgggcatggtagctcatgcctgtaatcccaggactttgggaggccgaggcaggcagatcacctgaggtctggtgtttgagaccaacgtagccaacgtggtgaaacccagtctctaccaaaaatacaaaaataaaattagctgggcgtcctggtgtgcacctgtagtcccagctactgggaaggctgaggcaccagaatcacttgaacccaggagatggaggttgcagtgagtggagattacaccactgcactccagcctcagtgacagggcaagattccatctccaaacaaaacaaaacaaaacaaacaaacaagcaaaaaacaattcttatgcccccaactgactgaatgggcctcttcttggcccaggggaccccagaaaaaccttgaaaactgagttcccagtgaaaatgggatgggaggttggacccatctcattagaccctcctggctagctaaccaccattaggctttcttctctaggggctacacagaaatcagctttttaaaaagactctgccattgacatcaacccactgcctgatgctgcctctccttttggatttcaacaaaacatctgaccagcattccttcctaataaaagaccgctgtccatgaagtggttctgggcagtgtaaggaggatacacagagagagttttcatgtcctctgcttcaccttttgacatcatagggctgaaaactccaccctcggatcatgctaatattgccatttttttaaacacgggtcccatggagaggcatgaagctcaatgcgaatgcacatgtttctcttttcataacacgactcttcctatagcttagtaaatatgtatatttggccatcctgctcagcataaattcctgtttcctttactcctcccttgaagtgcttgtttctagcttctgaccaaaggctacgctgaccagcctgtcagaatggccactctgctggctgcaaactttaacaaggagtaaagctcctctttctaatttagttgatacctgcaacactgggttaagccaaattaaatactatttctatatttaggattttgtatgtattttatgggagaatacaatgtgaatttccatgaatataatataaaatattttgtagaaattctgttttgtcagatgacacttgtctaaactgccaaactggcattcacttggaccctcaatgttgtcaatattttaagtgaaaaatatcagtcattttaatgtttaattctcttgtcatgaatatcttttcatgtttataacgtttatatatcctttttattaaactgtttatttgttcccattttaaaaattgatttgttagtcttattgatgtatagaagttctttatatattattggaattagctctttgcctggtatgagtgtaaaatattttttcttaattgtcatttgacttgaaactgttaaaaggttatcttccttttcttttttcttttctttctcttttcttcctcctttcctctcttcctctctctctccttctctttcttgctcctttccttcttttctaccatcttttctagcctaagccattgcaatagccttcttataataatagcctggcttttattcctgtttctgtcagttttttccccatataaacagccagaataatttttgaaaagcatacgaatatttcacacaactgcctcaaatatttcaatggtttttccgttgttctcagggtaaggtcctatattgacttacaagacttctctgatctggcgccccatctacctctgtagcctcgtttgcagccactttctgtatcgtgacgttttttcccttttcctctaatgtgccagtcccctttcctctcagggccttcacatgtactgccacacctcttcattcacctataattttgactggacaattttttgttctttaggtcttagcttaaatggcgcttttgtagagacaatttttgtactccttagattatatgcctttcttgcaatcctataatagccttcatagctcttgacccaactctatggtatataactactcgtttatttaaatatcggtatctcctgccaatgtctaaactttgcgctgtcaggaattctctctctctccttttgtatttctagcacctaccaaagggccaaacacacaatggatacttggtaaataattgtttaaaatatattggttgaaggaaagaaaaagacttgagagttgggcggtagacaaagactttagtaccgtgccaatgaattcatactttatgctgtagaaaatgaaaaccattgatacatttaataacatggaccagttttatgtttgttttattcttccttctcttcttatagaatgttggattttcaatcaataattattcttgagtattctttcatatgaccaggaatctacatgggtacgtagtagggcatctttaaatccttaatgaaaatggagtgcattctttcatcattggtcatgggacttgattttaaaggtatatctatatatacctgactttttaacttaaagcaaataattcttaaaagagacttgccatttcttatcgatactctcccaaccaaaaataacttcaatggtctgagccatatcacaatattttatgaaataagttaatattacagtattagagaatcacagattttaatggtaatggtatactcaatgatatttttgtgaagaaaggaaaacacatatgtgagtatcaggtactgaaaaaaaaagttatgtgttttaccttttttttttttttaaacagagacaggatctagttctgtcacccaggctggatggagtgcagtggcattatcatagctcattgcagccagaaactcctgtgcttgagtgatcctcctgcctcagccttcccaatggctgggactacaggtatgcaccaccatgcctaggtaatttttttattttttgtagaggtggggtttctttatgttgctcaggctggttttgaactcctggcctcaaggaatcctcctaccttggcctcccaaatgttgggattacaggcatgagccattgtgccctgcctgttttatattttgtaatctaaacaattattagataatgatctaattatatatgataataacagaataataaacagaaaagatatctctgtgcttctctgctcagtaatcttttttaataatattaggacttgccttcatttatgtaatgtttttcatgttcaaattgcttaaccaaaattaagtaattaatccttataaaattctgcaaggcagataagaattatcttcattttacagattaagtcgaatgtaccatattccaaatgattaaggcttcgaaatctccgataccaaatggtctatgttcccctggaagcatgtggaaacctaaatttacatagtaattatgtgttcaattgtgctgaggaagcaagcggcaggcccagataatcttccaaaaaagaaagaaagaaagaaaaatattgataatataccaaaaatgagtaatgtggtttttaaaaccttgttcaatgataatattattattcacatatagcgattcttcagaagtcctcctatgctaaaaacaaaaacagaaaaaccccgcaagaaccttggtaaatgctaatgttttatgcagagaataaattcaataggatgatgaaatttgcatcttgaaagatgaaaaaggatcctcagtctatttggagataatgatgatgtacagctatttccttatcatttagtacataaattcaagtattgggctgtattctgcttactgtgaatatgccttgtgggtgaggagaatttgtgttaaaaaaagaaattgtgaaatgttaataagaatgtaattccttagccttacattgtggaaggactctgataaatataccatttctatttttgaaaaaacatagcacttttctcaaggcagagggacaagtcataattgtcagtcaaaaaatgagaaaagttgtctatctatctgtctatctgtctatctatctatctatctatccatcttagttttcccaaaacagaagattctagtcaacctgagtcagcataacaggaaagtcccctctgttttaaccctatataaagaaagtaactttgacggccaggtatgatggctcatgcatgtaatcccagcagtttgggaggccaaagtgggaggattgtttgagcacaggggttcaaaaccagtctgggcaacatggtgaaaccttgtctccacaaaaaatacaaaaacaaaaaatacaaaaattagccaggcatggtggcatgcatctgtggtcccagctactggagaagcttaggtgggaggatcattttagcctgagaggttgaggctgcagtgagccgttattgtaccactttgctgctccagcctgggcgacagagcaaaaagaccttgtctcaaaaaaaaaaaaaaagtaactttgaaaacaccaatctgctttttgttctctgcttctgctttcttcagccctttttctgcccataaagtcaacctcatctgctgagctcaatggagcactcattctactttacagaataaggtgttgctgatactagaagtcaaaataaaagccagctagatttttattgtaattttgtcttttgacagagctaaaaaaagatccaggtaagttaaaataccagaaaacagtagttttcaagatgagaaggtgtggcccgaattaaagtatttgaagtctttataataattgagaggagggaaaaattatatcttctgatattaagatagctatacattttgtattttaggtcactcactaaagaacagaaataaagtataaaaattttaacatatttgaagaagagagatgaaatgagaaatttgtttatagaagttagtccaactcttttaacctgtcaatataagttagagaatgctatgtaatctgtcatgtcttgaaatgaaacattttaatcctcttcctcttccatcttttccttttctttttcctttctgctttccttaaacattcattgggcacctgatgtgggatagaacttaggtcctatggattcagagataaatgagacaaagaaggaaggaagaatctgatgaagacaagaaacgcatccttttgattgagggagatatgagtggggtttcaatggggaaactatggtagtcagaggagagtaggaggccactagactcgtctttggttagctaccaaaggtgaacgttgcatcgttgagagagtgacatagataatctgcattgacttggaaaccatatttgatcaattaatgcagctttaattttttttttttttttttttttgagacagaatcttgctctgtcgcccaggctggagtgcagtggcgcgatctcggctcactgcaagctctgcctcccgggttcacgccattctcctgcctcagcctcctgagtagctggaattacaggcacatgccaccacacccggctaatttttttgtatttttagtagagacgggtttcaccgcgttaaccaggatggtctcgatctcttgacctcgtgatctgcccgcctcagcctctcaaagtgctgggattacaggcgtgagtcactgcgcccggccatagctttaattttttttttcaaaaaaagtgatagagtcgaaaagataaaaaattaggcactgactttctgcagatgatttttccttccctagcatttatagaatactttttatgtgctaaatactttacattcattaaaccactttattctttcaaatgaaatatgaggtaggtactagtattatttctattttaaagatgggcaaattcaggctaaactaggtaaaatgacttgcacaagagctatccgattccaggacgtaggaacagaaagggatccatgctcgaataagtttgggatatacaggattaaagatatttagcatgcaactttcctgatgtgtttttcaggtactttatgagttccctaaaagggtgctgcagtatgtaacattttcccaacttgtggaactggtgggttgaaccaacacaacttttaggacggaatctaaatgcaaatttattttgtctcccaccattcctctaaaattttttcagaggagatgtacttctctagcccctggctgaaaacttgaaaaggccagattttctgatcacccagtaataaaatgtttcatttacttcaagtagaaaacagcatcttagttgggaatttgcatgttagggtaaagttcacaatctgcttgcatttttattctgaaaaggatttaagcatccaatccatagtggcagaccaattatctcgaacataagcatcttaaagattataataaaaataacatttaaagaaaaggaaaattttagcgttgtattcagtaaacattacatttgcatacttcacagtaatatagcatactgtaaagtgaaataatgtaagcaaaataaatatccataattaattagtttcttcagatgaaacagcgagaggccaaaatactaaaaaggaaataaatacagagactttttgaaacaaacatttgaatgagagaatccttagcatagcttagtgtagactgaatcacagaaaaggatcttttctttttgagacagagtctctctctgtcgcccaggctggagtacagtggctcaatctcggctcactgcgacctctgcctcccaggtttgaatgattctcctgcctcagcctcctgagtagctgggattacaggcatgtgccaccatgcccagctaatttttgtatttttagtagagacagggtcacctttttgcccaggctgctctcgaactcctggcctcatgtgatccgcctgccttggcctcccaaagtgttgggattacaggcgtgaatcactgcgcccgatccttaaataaattaaggatcttaatttatttgtgacatatatttaaaatatagctctctgtgacatttgtgacattgctgtggaataaacgagttcaaatggagaagagaatccataggctaagcaaactgcttaagtcatacaattggatggtttaaagaaggtcttagaaaaactgaaatctccaaacaaacaaaacaaaacaggtgtgtttgtagtagtctagtgaaaatattaaagcctaaagtttttttttaatacagaaaaatagaaaattacctggagtcattttatataatatatacatgtcatatcttttatatgttttcaaactttgtaaaatggctaaacaaatacatgtagcttctagtagagatacattttatgattagaaataatgttggtactactattctttttgctttaagaccaccactgtaatatatactgttaaaccaacaagaactgttttgtgaaattaaactccgttaggagaaaaacaggttttgtaagtccttattcttccaatgccttctctgttgtcagtccctccacatgttgattctttctttgcttgactttcaagactctaaaagcctttctgcctctgtcactcctctatctccttgctggttatacttcttcctcttgaccttgaacacggaatttggtccttgacattctgctgtttcttcacaatggtctttccttaggcagttcactgagatgctcctcaaatccaccctggccatgacattttcctctgagatttatttccctatctctatctgccagctggacatatttcttatggtcaattatgcttgaattactggagtcagctttagcttttctctcttgtttgtcttcatatcaaattagtcacaattcttcttttctgattcatcttttcagattagcaggagtccaaagccctggacctatgctaccctcatgatttccctcatgattatgctaccctcatgatcatgctacccctcatgatttcctagacatgaggggagggtgggcttgtgaaggagaccatgcatgattcaagagggagattcccagggtgaagcccaaattgagagcaggcagccagcctaactatgactccttcacaaacagactaggcagagtgtgagaacctaagttgagtcaaattggtggaaacagggacataagacttgaagaagttggccaggtacggtggctcatgtccgtaatctcccaacactttgggaggcgaggggagcagatcacttgaggtcaggagttcaagaccagcctggccaacgtggtaaaaccctgtctctactaaaaatacaaaaattatctgagcgtggtggcaggtgcctgtaatcccagctacttgggaagctgagacaggagaatcgcttgaacctgggaggtggaggttgcagtgttcgagattgcgccactgggcaacagagcgagactctgtctcaaaataaataaaaacaataaaaattaaaaaaagatttgaaaaaaaaagacttgaagaagtcggtctgaactggagtgtgggaagcaaagttggtggaattccatgagctgtcagaacatcaccatacatattatttaatagcccatggactaaaacaccttagatatttttataatgcatcttcagccttataaatggaatgatctcttacaggcacttcttctacatatgaatattataataatctcctaattggtttttggatctcaaatctttacctttactctatatcttgtagtaacttttaggttactttccttaaaacactttctttatctatgcctattccctgttcaaaattacattgactctcttttatccatgagataaaaatcatttgcctggcaatggaagcctcctaaacatatatatatatatatatatatatatgtatatatatcccactaattacttatatgcagccctcattccagggaaaccaggctacttagtactcataacacacaataggtgaagtctcacaccattctcatgctattcctatattaatgccccttcacaaaaaataaccccctcagttttctttgcaagtataaggcctccagatttcctaggccacattaaaacctgtctacactttcttctgtaacttaccagctaactgccatagccattaaggacaaccacagaatttgtaacagccactgccaccatttgtttagttttattaaatgctgagtactttacatacattagctggtttaatgtcttatttattccttatttgttattactaaattctttgtgtcctcagagcctaaacatggtattatgcatataacagagagtcataatttactgatgtttgtattgatgtgccagcattttaagaatgggaaggccattggaatttggctatttaaattattttcttctacctagtttcacctgaatttttttcatagaaatgtttatatgataataatgaggaaaattcttagaatgctgctatctcagaatgccttttgtctccataattgcttctccaggtaatatatgttgtaccctaaggtattttgactgcattgtgatgctaatgtatatgtaaatatcataaagggaatataactaccatgctcattttagttgcatgaagtgagggttcaggaaaggagagaattaatgtctgccagtggaaaataataaagctaatgagaaaataaactttacctttcaaccatcataaagtccattagcaaataacaacaaagactggagaaagaattaaaattcattaaaaaaaatcttgtgctctccttaatgtgttttgcttcctaatataattcctgtttgctacgattttccacttttcgttatcttaacaggctgttctcatttcgatagcactcccagttgagttccacataccctcctgtgtgtcatatacccttaatacttttcacctttttgtttctatgcctgccggtctgttttgaaacttactttggagagtgtgttaaatatcctaccttctagtacactaaagataattatgtccttgttggcttaccaggcgtgccaatgatgttaatctatgtaaggattaaaattgtgggttattcacaaacaataaagaagccattctgatttcctatattattctcataggcacagcaggaagcggatacagtatgttgtcatttcttcttgttttgttggcataatggaatgaaggtgcaagaaagatactgccaccccaaagcacatccctctttgtcacctgtgcctgctaatttaacattaatgagtcattcccacatgttaggcattgccttctctttttatcttccttaaaaatgcaagtactcttaaggtataatacattaagtctggtccctaacacttcattcattcattcatccatccattcagttaaaacgcctgtatattgtagattacttgtcgataggggcaacatagctgtaaacttgacaggtgaggccttgcccttaagtgctgacattctaatgtcagagacagatgaccaataaacactcaaataatgtaaaaaaaatagttaactgatgggaggaagttatgagggaaatagacaggtaatgccatagataatacagtggggctaactagtgagaagggccactttaggcagaaatgtacctctctgaggaattggtatttgggaaatcacgtgaaaggccttgagactggcggcaaaggagtgaggctggagtacagtgagcatggggtggtggtggtggtgacagtggtggcacctgatgggaacaaaaaccagatttcttagggccttgtaaatcatggtaaggaattcaggctttattttaagagcaatgggaagccacccatgggatttcatcagaggagcggcacgatcctacttatgcttttaaaaactcactctggctgtgttatagaacatatttgcagctagttagtggtaggctgagatctgcccacagccattctgctccagcgcccaggttcttccttactgcaccgcactctatttccttgcctttgtgctttgtattccctgtgcctggagcagcctccttcttccctgagccacccattctcgagctggcaaattcctactttcttttttagatacaagctcagatgctacctcctctatgaagaggatgactctacagtttatcatcctcactaagacacttgtgagtgtgcaagggggcgctgctagaaactctgctaaatatgtgtaaaatcaaccgtctcaacaaacagggatatatggctgtctttgcttccaagtggcttttacttatttacttattttttagagaatttataatttattgttattaggcataagaaattaaatgtgaatagctgcacagtgcccactaatccaaagcaatataatcaagtggtaggtattgttgtcagtcagtgtaccaagaaacaaacaaacaagcaaaaagaacgatagaacttggggaaatgacccacaagattgagactcctattgttcattttaagtaaacacatgcacacacacacgattatgtcattcaaaagtagactttgtatatgtaaattttttttttttctttctgaggtggagtctcactatgtcacccaggctggagtgcagtggcatgctctcggctcactgcaacctctgcctcccgggttcaagcgattctcctgcctcagcctcccaagcagttgggattataggtacctgccaccatgcccagctaatttttgtatttttagtagagatggggtttccccttgttggccaggctggtctcatactcctgacctcaaatgatccaccagcctcggcctcccaaagtgctgggattacaggcgtgagccactgtacctagcccttaactttttttgacagggtctcactttgtcacccagactggaatgcagtggcgtgatctcgactcactgcagccttgaccttccaggctcaagagatcctcccacctcagccccctgagtagctgggactacagatgtatgctaccatgcctgggtaatattttgtattttttgtagagttggtgtcttgccacactgcacaggcttgtctcaaactcttgagctcaagtgatacactcgcctcagcctcccaaaatgctgggattacaggtgtgagcctccatgcccagccaaaaattgagtttttaaaggcaattatctgaatttagtttttcattagtccattgggttaccgttattccttggacttgtgagatactgacagggccctcaatagaagtacctatggctaatataaaagttctaacaacaggaacttgttcctcaataatacaaaataaatatttagatctgcacttggttcatttctgagtaagatataatgtggtaagcattgtattccaatacttaggaaaatagactagggtttgagaagtgggcttacatgtgagtaatgcaggtgaccacaacagtcaacttgttcctcaaatctacctaacttactacctctcaagtgatatgcagctccttgacaaacatttatcacatatttattagaattgccttttatgacctgtatcctttggtagcctctcaggtctttaggagaaataatggtcttatttttcatttatctcagtggatggtgtagcacttggcacatattcactgacattcaggattttagcgattgaacaaatgagtgaatgtatctattttgagaacaaaatgttaggagatacaggagctacaatgatgactaagatatagttgcaagttcttccttgcgttcttacttcttttattttcaatattttcttcaaaaattcaaatgccacttggagaattatactctaatttactgtcatggatattagctggtgccactgaataagaaagattcctaggagggaatataagagaaaatagaccagaaaatggcacactgagaggtgatttgaaactttatggatttttctctaatgtcagtgaacattctcttataaaacattatttcattttcattaaaaaaatcattcatcgatattggtgaatttgaaattcaagtcaagtacatacaaaaactaaataccaagtgatgaagcaacttaattttactacttatgagtacattaaattttattgaaatgagctgatttaaagtacaagtccctcagtatagtccatttgatttgagtcctacagtgtaattaggtaagataatgctgcataagttgttatgtatgtaatttttgtgtacataaatgtatatacacatcatgccatagagataaattgttagatatgtatgcaaggtaatattttatatatggcatttaatttacaaaatgaatgctttaattattttactaccctcaaaagaagaaggaaagcaaaaccaatacaattgataaaaacacgtagagatatgataaggaaatattttttcatttagaaaatgacacatttttatagccacagctgttctttaaagccagtaaagagagtttttaaaaaacatttattttatttcaatagtttttggaggacagatggtttttggttacatgaataagttctttagtggtgatttctgagattttgttgcacccgagcagtgtacactgtagccaatgtgtagtcttttatccctcatcccttcccatccttcccttttaagtccccaaggttcattataccgttcttatccctttgcatcctcatagcttagctcccatatgatatttgggtttccattcctgagttacttcacttagaatagtggtctccaactccatccaggttgctgcacatgccattattttattcctttttatggctgagtagtattccatggtgaatgtatactacattttctttatccacttgttggctgatgggcatttaggctggttccatatttttgcaattgtgaactgtgctgctataaacatgcatgtgcaagtgtctttttcacgtaatgaaggagagagattttcatatttgtgaagacttcttgaataggtcttgcaaatattctgtcgttacagttttgtgattaagtaagctgaattgatcaagcctttagggaagactgttaaaaacaaaaggaggaggaacattttatagtaacatggtttgagtagtttgcagttgctaattttagcttataatttattagatcttcttgatgaatctgaagttattgctttggtgcatttcgtacaaatgattttgccataaatctttaatgaacttttaattttaatctctctagttgatgcataaaaatggaacacttctgtggcactggaaaaaaagtacacaagtttagaaaacatgggtttaaagaggacacaacatttttgatggtgatttagaaatagcaaacacacacatagaggaaataactctccaggttaaaaaaaaacctcatttgttttttcttaggtacatgctctcaatatgctgttaaatcaagttattcaacaagtgtttattgactactgtgtgcctttaatgttcgtactagtaatctccagtgacatttaccgagtgtgtactgggtgtagattactgtactagagggagttagtggtttgtttatttgtagcagacgcaggtgctgctgtgttttttggggcctgatggtttactgacataggctgtagtctcttcagagaaaagggttagttcaggtgctaagaaggccgtctgaaacaaagggatagctttgtaacagaaaaatttctacatttcaggccaaattttggaaaagctatttcatgtattttttctaaaattctcctgtctactttttgaatggctacaatatagctattaaaggagagagtcttcaaaggagagaagaggaatttgggaaaggtcagtaagaccctctaggtggggcagcaggaactgccttgagcatgatagaaatccagtgggatcttgtaaagtgtgagtaggttctcagaggatctctagatttgtttaaatatgagtaagttctcagaggatctctagatttgtttaagtaatctcagaaatcatctgtatgtggatattaaacataactcctcaaaccagtcttgtgcaactccattagaatgcagtttctgtagttaaatgaattctgctgaattaactagaccttggactatagcttttaacatgttaaataattattttgaattataggcaggaaaattaagaaagtaatacatttggaaaatggtctatatttgtggcaatgaaaaaatataggttttaaaaattacatgcacacacacaaactgccaaggagaatcaaagcaacttaaaaaacaattaaatgtaaataaacaatatcaataaaaaaactgagccatacttaggtattcaaataattgatattgggctttatttttaaggggaatatgaatttttaatagaaatctctagaacttttaaattccacttttaaaataacttaaaaaattatgcaaatagcacactttcattgtacaaaattaacaaatataaatgtataaaagagaaagaaaattgaaaaaagaagctttactaattctatgagtaccaggtaaccattgtttaaattttgatgtatttatgtacttatttatatgtgtacatgttaacaaaagcagataatgcaggtgttctcttagagtattgaagaggaggggagtgggtgggcagtgtaggtagcacagttcatcccacatataacccacctatgtgacaattccagcagcaggttcttaagagagaggctcttgagatggtggggggaaagcaatgattccacacatggtcccagtgttccatgtatcttccttttggttccagggctggatatttctagcagtagggaatttatttcttaagaagaatgtgtctggtggtgaatttattttggaactccctctggagcaagattttgctgcttctgggctcctacatctgtggcatatgtaggaaagccaaggatgcaattcaaatgaggaaggtgcacactgaggtagcttcatgtaccaggtcttgctcctcttaaaatatgccccaactcagtccttgtcatcagtagcaggagattaatcctccctggctaatcccctaaaaggaattctgggacagatgagagatataggaagtatccttccatccttttccacaagatctgtgtttatgaactaataacaataacaggaacacaatcattgaggatttacctcatcccaggccctagacgcattaatgcattcagttttgacaacacctcatgagggttcttgtgtcagtctgctcaggctgccatagcaaaataccagagtcggggagcttatacaacagaaatgtatttctcacagttctggaggctggaaatccaagggttggtatctggtgagtcgtctctccttggcttgcagatgcctgccttcttgctgtgtcctcacatggtgttttccttgtgcatgtgaatacttggtatctcctcttattataaggacatcagtcctattaaattaaggtcctgcccttatgaccttatttaacattaattacctctgtagaggccccatctcctaaagcagtcatactgggactttagggcttcaacgtatgcattttgggaagacacaattcaatttataacagtggtactcttattattcacattttacagaagagaaacagattttattttaccaagatcatccagctagatgatgataaaacttaaatccaactttgtctaatctggaaggcatattctggaccaccatactatactgctataagatgcaatttaggtacatagttcgctctggagttccattctactctataactattgtaagttcctataagattctgacattaggttatcctccagtttagttttcaagattattttgaatttttagcactcttcttggtctcctgaatgtttttgtgagaatatgagagaaaatatatggtcaccattaaatgattttgagccatttgggctagctaattccagatatcaactatattttgtagtgggaaaaagaactgactctgtaatggtatcaaatctgtagcttttcttaccagattgtagcaggagtactttaacccaagtaaaatgcctgcttgctacctatttcctattgattgtagtagttctttattgaagagaacaaagcatcagagattcacaatacccgtttttcctaagttatcaaaagctctattgtgtaataatgctgccttacagtttttcataggagaactctatttgcccttaaaagaattataattctgaagtcacgaggcaaaaaacattgaaagttaagctgacgtttctatgcctctttagttttctggtatcactgacaatatggatcgggaatgggctgttgctagcaaagtttctagtcctgaattggcatgatcacagagcacaggatcttttcaaacaccacatgatgagtatacaaggcatttgacagataaaatgccgtaatggaagttttttttttttttttttttgacagaatcttggtctgttgcctggtctggagtgcagtggtacgatcatagctcactgcagcctcgacctccagggtcaagcaatcctttcacctcggtctcccctgagtagctgggggtacaggaatatgccacaacacctggctaatttttttatttgttgtagagacagtgtatccctatgttgttatcaccagcaagcccttaatagtgctcagagggtggaatgcaatgactggcttagcctagtaaacagctggtttacccccagctgttctagaaccacatggatattatatcatggatgaagggtagaatggttgttaggatgattgccaaaatacccaattgtattcataaatatcctttttaggggacctgaaccaaaacttaaaagcaaaagatatctggggtctatttaagttccactagatcagttaggaagtattagcttgcatcacaggaagaaactagcacagactggccaaataataggaacaggaaatttatttacaaaactgagaagttcagcagcaatgtagacttcaggcataatttgatcaatatatgaagtcatcctgcaattattttggctgtacactactctgtgtgtctacttcttctactgctgactctctttatggtaataaagtggtaacaattctagctatcacacacttttgaaaagtagagattggtgtgccaggaatttctagcgtaaggcctgagattttctgtttgactagactagatcacacgtgccccaatgagccatgaatagtgctcaaagggcgaaatgcaatgattggcttagctgaggttatgtactccattcctggagctgggggtaaagccagctgttctagaaccacatggatgttatatcatggatgaggggtagaatgtttattaggatatcatggatgaggggtagaatggttgttaggatatcatggatgaggggtagaatggttgttaggatgattaccaaaatattcaattgtattcataaatactgtttttaggggacctgaaccaaaacaaaagcaaaagggattatttgaaaataaattatgcggggtcgcttataaggtggccgaataggaacagctccggtcttcagctcccagtgagattgacacagaagatgagtgatttctgcatttccaactggggtacctggttcatctcactgggactggttggacagtgggtgccacccatggagggcaagctgaagcagggcagggcattgcctcacctaggaagcacaaggggttgggggatttcccttttctagccaagggaagccatgacagactgtacctggagaaatggtacactcctgaccaaatactgtgcttttcccacagtcttagtgactggcggaccaggagatacagtcccatgcctggctcggcgggtcccatgcacatggaggcttgctcactgctagcgcagcagtctgaggtcaacctgcaatgctgcagcttgacagggggaggggtgtctgccattgctgaggcttgaatagctcacagtgtaaacaaagcagccgggaagcttgaactgggcagagcccaccacagctcagcaaggactactgtctctctagattccacctctgggggcagggcatagcagaacaaaaggcagcagaaatttctgcagacttaaatgtccctgtctgacagctctgaagagagcaatggttctcccagcatggcgttcaagcaccaagattggacagactgcctcctcaagcgggtccctggcccctgtgtagcctgactaggagaaacctcccagtaggggccgacagacacgtcatacaggtgggtgcccctctgggatgaagattccagaggaaggatcaggcagcaatatttgctgttctgcagtctctgctggtgatactcaggcaaacagcgtctggagtggacctccagcaaactccaacagacctgcagctgaggggcctgactgttagaaggaaaactcacaaacagaaaggaatagcatcaacatcaacaaaaaggacatctacaccaaaaccccatctgtaggtcaccaacatcaaagaccaaaagtagataaaaccacaaacacagggaaaaactagagcagaaaagctgaaaatgccaaaaaccggagcgcctcttctcctccaaaggattgcagctccttgccagcaagggaacgaaacttgacggagaataactttgatgagtttacagaagtagacttcagaaggtcggtaataacaaacttctccaagctaaaggagcatgttctaacccatcgcaaggaagctaaaaaccttgaagaaaggttagatgaatgactaactagaataaacagtgtagagaagaccttaaatgacccgatggagttgaaaaccacagcacgagaactttgtgacacatgcacaagcttcaatagccaatttgatcaagtggaagaaaggatatcagtgatttaagatcaaataaatgaaataaagtgagaagacaagattagagaaaaaagaatgaaaagaaacgaagaaagcctccaagaaatatgggactatgtgaaaagactaaatctacgtttgattggtgtaccagaaagtgacagggagaatggaaccaagttagaaaacactcttcaggatattatccaggagaacttcactaacctagcaaggcaggccaacattcaaattcaggaaatacggagaacaccacaaagatgttccttgagaagagcaaccccaagacacataatcatcagattcaccaacgttgaaatgaaggaaaaaatgtaaagggcagccagagagaaaagtagggttacccacaaagggaagtccatcagactaacagcagatctctcagcagaaaccctacaagccagaagagagtgggggccaatattcaacattcttaaaggaaagaattttcaacccagaatctcatatccagccaaactaagcttcataagtgaaggagaaataaaatcctttacagataagcaaatgctgagagattttgtcaccaccaggcctgccttacaagaactcctgaagaaagtactaaacatggaaagggacaaccggtactagccactgcaaaaacatgccaaattgcaaagaccatcaatgctatgaagaaactgcatcaattaatggacaaaataaccagctaacatcataatgacaggatcaaattcaaatataacaatattaaccttaaatgtaaatgggctaaatactccaattaaaagacacagactggcaaactggataaagagtcaagacccatcagtgtgctgtgtttaagagagccatctcacaggcgaagacgcacatagactccaaataaagggatggaggaaaatctaccaagcaaatggaaagcaaataaaagtgggggttgcaatcctagtctctgataaaacagactttaaaccaacaaagatcaaaagagacaaagaaggccattacataatggtaaaggaataaattcaacaagaagagctaactatcctaaatatatatgcaccaatacaggagcccagattcataaagcaagtccttagagacctacaaagagacttagactcccacacaataataatgggagactttaacactccactgtcaatattagacagatcaatgagacagaatgttaacaaggctatccaggacttgaactcagctctggaccaagctgacttaatagacatctacacaactctccaccccaaatcaacagagtatacattcttctcagcaccacattgcacttattctgtaattgaccacatagttggaagtaaagcactcctcagcaaatgcaaaagaacagaaatcacaacaaagaagtctctcacaccacagtgcaatcaaattagaattcgggattaagaaactcactcaaaaccacacaactacatggaaactgaacaacctgctcctgattcactactgggtaaacaacaaaattaaggcagaaataaagatgttctttgaaaccaataagaacaaagactcaatgtaccagaatctctgggacacatttaaagcagtgtgtagagagaaatttatagcactaaatgcccacaaaagaaagcaggaaagatctaaaattgacaccctaacatcacaattaaaagaactagagaagcaagagcaaacgcattgaaaagctagcagaaggcaagaaataactaagatcagagcagagctgaaggatatggagatacaaaaaaacccttccgaaaaatcaatgaatccaggagctggattttgaaaagatctacaaaatggaccactagcaagactaataaagaagaaaagagataagaatcaaaatagacacaataaaaaatgataaaggggatatcaccaccgatcccacagaaatacaaactaccatcacagaatactataaacacctctacacaaataaactagaaaatctagaagaaatggataaattcctggacacatacacactcccaagactaaaccaggaagaaggtgaatctctgaatagactaataacaggtactgaaactgatgcaataattaatagcctaccaaacaaaaagagtccaggagcagatggattcacagccgaattctaccagaggtacaaaaaggagctggtaccattctttctgaaactattccaatcaatagaaaaagagggaatcctccctaattcattttatgaggccagcatcatcctgatacaaaagtctggcagagacacaacaagaaaaagagaattttaggccaatatccctgatgaacattgatgcaaaaatcctcaataaaatactggcaaactgaatccagcagcacatcaaaaagcttatccacaacgatcaagtcagcttcatccctgggatgcaaggctggttcaacaaatgcaaatcactaaacatcatccatcacataaacagaaccaatgacaaaaaccacatgattatctcaatagatgcagaaaaggcctttgagaaaattcaacagcctttcatgctaaaaactctcaataaactaggtattgatgaaattatctcaaaataataagagctatttatgacaaacccacagccaataccatactgaatcggcaaaaactggaagtattccctttgaaaactggcacaagacaaggatgccttccctcaccactgctattcaacatagtgttggaagttctggctagggcaatcaggcaagagaaagaaattaaaggtattcaattaggaaaagagaaagtcaaattgtctctgttttcagatgacataattgtatattgagaaaaccccattgtctgagcccaaaatctccttaagctgataagcaacttcagcaaagtctcagcatacaaaatcaatgtgcaaaaatcacaagcattcctatacaccaataataggcaaacagagagccaaatcatgagtgaactcccattcacaattactacaaagagaataaaatacctaggaatccaaattacaagggatgcgaaggacctcttcaaggagaactacaaaccattgttcaatgaaataaaagaggacacaaacaagtggaagaacattccatgctcatggataggaagaatcaatatcatgaaaatggccatactgctcaaggtaattcatagattcaatgctatccccatcaagctaccaatgactttcttcacagaattagaaaaaactactttaaagttcatatggaaccaaaaaaagagcctgcatagccaagacaatcctaagcagaaagaacaaagctggaggcatcatactacctgacttcaaactataattcagggttacagtaaccaaaacagcatggtacttgtaccaaaacagatatatagactaatggaacagaacaggcctcagaaataacaccacacgtctacaaccatctgatctttgacaaatctgacaaaaacaagccatggggaaaggattccctatttaataaatggtgttgagaaaactggctagccacatgtagaaagctgaaactggatcccttccttacaccttatacaaaaattaactcaagatggattaaagacttaaatgtaagaactaaaaccataaaaaccctagaagaaaacctaggcaataccactcaggacataggcatgggcaaagacgtcatgactagaacaccaaaagcagtggaaacaaaagccaaaattgacaaatgggatctaattaaactaaagagcttctgcacagcaaaagaaactaccatcagggtgaacaggcaacctacagaatgggagaaaatttttgcaatctacccatctgacaaaggactaatatccagaatctacaaagaacttaaacaaatttacaagaaaaaaacaaacaaccccatcaaaaagtggggaaacgatatgagcagacacttctcaaaagaagacatttatgcagccaacagacacatgaaaaaatgctcattatcactggtcatcagagacatgcaaatcaaaaccacgatgagataccatctcatgccaattagaatggcaatcactaaaaagtcaagaaacaacaggtgctggagaggatgtggagaaataagaacacttttacactgttggtggaagtgtaaattagttcaaccattgtggaagatagtgtggcaattcctcaaggatctagaactagaaataccatttgacccagtgatctcatgactgggtatatacccaaaggatttttaatcatgctactataaagacatgtgcacatgtatgtttattgtggcactattcacaatagcaaagacttggaaccaacccaaatgtccatcagtgatagactggattaagaaaatgtggcacatataccccgtggaatactatgcagccataaaaaatgatgagttcatgtcctttgcagggacatggatgaagctggaaaccaccattctaagcaaactatcacaaggacagaaaagcaaacactgcatgttctcactcatagatgggagttgaacaatgagaacacatggacacagggcggggaacatcacacgggggcttgtcggggggtggggggctgtgggagggatagcattggagaaatacctaatgtaaatgacgagttgatgggtgcagcaaaccaacatggcacatatatacctatgtaacaaacctgaacattgtgcacatgtaccctagaacttaaagtataatagtaataaaaaaagaaaataaattttgctcacccggcctgaaattatggccagatttttaaaaaattacagtgaaacatatacaactaattgatattcttcaccacattaaaaaaagccatacaaatgagattcctgtcaccatttattcaaaaaacgttttctttcaattattttatattttattacatttatactttagtatcactttattctttttacaatttatttttatctttttacattcacaaattttataaacattgagtgcctactatgtgctcagactgggatctagagattaaggagctctagcatttaatagggaagacagacagatgaacagatatttcaatatgctaagtgtaatttgacaatacagtgaagtagttgacatcataaactctcctaacagaccgactggattcaaattctagccgtgcctttcattcagtgaatgacattggtagacaaaatctgtgaacctccccactctgcactcatctttttttctcctgtaagtatggagaaatgcctctctttccattcgagactgaaccctccatatgttctcttgattgtatttcctctgcccatcttctcaggaacatttacttcctgaaccttagcttcttttcaacaaagttgggagaataatagtactttttttaaaataaggatgttctaaatgttaaacataataacacatgtcaaagacttaatacaaagcctggcaaataagaagttctaaagaaatattagtatagggtaaatgcaccttttagcaataacttaagcttaccttagaatgaccttgtatggcagatgcacctgaatgtgtgttctgagctagagaatccaggagtggccataccagagattcattccttgtctatgaggaacatgtgagcccccatcccatcccgtggaacatgggttgtgcaggagattgaggccctgagttctggagtaaatgaagattgccatgtgaaggtcattaaggagaggttgttaaatgaaaatgtgttgttaactacatgctgtcgtaagtggttgcagttttcctgcccagcctgccaccactgggctgtgcagttgtcttgtccagcctgctgccactggaccatttctgtaattaaggcggttctcctgtccagcctgtcaccactggactctttctgctgtatgtaagcccctaattaagccccatgtctcttttgctggccctggctctctggcctcttgaacctggtgcctttcctatagaggttaataggatttcggcataatagttagctataactgtttatggcagagctgtgttctgtgttcagtgcagagaactggaattgaattcagtccttttttaatctcccatctgactgattcccactaatacctggtgattcatctaactcacctcctacactgagttgggttaaaatgagtctccactatatttgagtagctttgtgggactagccctattgtacagagtatttaacataaagggttgtatcttcttgttcatttccctgtttttctaactatatcataagctagtggttcttggactctagcttgcagcggaataactggtctcaattccagcgtttctaattcagtgagtctgcaataggaccttgaggatttgcatttcctacaagtcccaggtgaaggtagtcaaggggccatatttgattagcactgctgtaagctattggaaggcttatccaaccaaacttgccatagtgaaagccgagggactctgctttttgttgccagcaaaattattgtccatatataggtctctcctttacctgtattcttctgaaaggtctagcactcatgggtcctctcagtcctcttacgtgatagtcttatattaatcatttacacctttgtgtaatcatagcagacagtgctcaggtggttgcaggtttctttcttacctgtttcttctatttagtcagttaaaaagacgcctgcaaattgtaaaacacaacaaatatgtgagttactgtagtgtttggaagaacaagatgatggattccaacactttccttctagacattgagctaaaagcattaactcactcaattctcacaagacagctataaacagagattctactctttgcttattacagatgaggaaatctagaagtgatcatctagatctttgccagctaaggactgtgttgctaggagtaggtaaaaaagagtgattgagtctgtgaaaaatacgatgctcacatattctgtggctctaaaagttgtatatatatgatatgtgttaaaaattacctttaattgcccaaatatttgtgtgtagactttctagtatgttgaatatttgagagcaattttatgtgtgtgtgtcaacactgaaatttgtatttggttcctttaaggttgataagaattctgggactttgagttttcaaaatcaaattatactggtacctctttggactaacgtcaaatactttagagaatatactggagatattaatgttcaacagaacacagcaaactttgtctttaactcttatttgaggtgtatagccaattgttacacagcactcattattatagcatattatacagtaaattcctttagttttaacaacacattctgttgctatataaaattatataaaatatgagagatcatcttacctatcatgattattgagctcaaaattggttatgtcagacccagaaatcaagaacaccagctagattgattcaaataagaaaggcctagaggagactaatccaatcagagacatggaactctgtgtttggaaaccatgatagcagacagtaagcaattgagtgtagctactgctacctgctaatacctatagagtgcgcagtatgtgttgggactcatgccaaactcctgggataataggattatctcatttagtctatgtaaatcattctgtgaagtagataatatcactatttcatttccttattcaaggttatgagttagcaattatataattattatattatgttatatgtattatagcctaggggtttgaatcagactgcctgtctgcaaagcaggagcctctaactgctatacaactcttactgtctactaagatagaattcgaaaccaagactctcaacatctggggcatatggttgctgttccctcaggaatttcttttaatgctgtgagacaagatttctatggatttgcccctctctgcttacagacaatcttcctctgaaatatttttgcttttcttattttcaaaagggtgcttaaaatggtaggattgaattgccagaactcaactttaaaattgaatttaaagggaccacaataagggttataaacagtgataaacctccacagtacataaaaataagaaagcatcactcttaatggatgatctaaaagtggcatgaagcagtaggcattggtaagtacattagcatagagagagtcaatgaatcatgaatgaagagtaatagaagtctgtagttcaagaaaacagtcctataatctgtgcattaagccttagggagtaattttcacaggaacggttaattgtaagaggagatttgagagcatgcactgatatcaattctcttcctttcctctcttaagtgttgtaccattctctcccatgtcattcagatgaatatagttattatgcacccactgtgtgaaaaacatttcactagaaaaaaaaaagaatattgtttaggctctgaactttgaatcctaaaacttgactaggaattcaagagagacataaaataaatagctaatataggctctaatctggggagttcacaatagtctacaactaagaattgcaagtttggacctgacatcatgacaatatgattattactttggtttttggtattgaatatgtcataatggtaagtttaaccttgggagggtaaacaaacataatcaaggagatcggaagggggagaaaaagtgattactcaggcttcatattaaaaagttaggcaaaggctctgatatggtttagatctgtgtccctaccgaaatcttatctccggttgtaatgcctacgtgtcaagggagggacctgtaatccccatgtgtcaagggagggaggtaattggatcatgggggcagttttccccatgctgttctcatgatagtgagtgagtatcacgagatctgatggttttattagcatctggcatttcccctgcttgcacttctctctcctgccgcctgtgaagaagatccttgctccccctttgtcttctgtcatgattgtaagtttcctgaggcttcttcagccatgtggaactgtgagccaattaagcctctttcctttataaattacccagtctcaggttttgttgttgttttttgtgtgtgtgtgtgacagactctctctctgttgcccaggctggagtgcagtggtaagttgtacaatcttaactcactgcaacctctgtctcccgggttcaagcaattctcatgcctcagcctcctgagtagctggaattacaggcaggtgccaccacgcccagctaattttttgtatttttagtagagatgggatttcaccacgttggctagactgatcttgaactcctgacctcaggtgatcctcccgccttgacttctcaaagtgctaggattagacatgagccaccacacctggccaggtatttctttatagtagtgtgaaaatggactaatacaggctctaagtcttataaccacttttcccatatcatccagcaccaggaacacatatgaagccatcactatctcttgtttctgaattaccagaaaaccaaaattgatttagttcctttcttcttctgactcaacattaaccacttgatattatatttaactgcttccttagccttaattgtatcttgtgtgccataggatctcactataggtgtcagccatgacaatgtgattgcaaaatttccaactatagggagtgcagattaccaagggtcccagatgctgctctctgaaatccaatgttgcatttgagcccaggccatgctttccgtgggctgcttacagcccagggctgactgacagagatgctaaggctggcctgtttctgggatatctggaccaactttagacttgaggccaccgaatggccttttgagtcttccttagactgcacagcagtctaggaagtttccatccaaactttcttccctttctctttcactgagggtcaggcttatacctcaatcaaatggctagtcttgcctggttccctccctattttttctcacttgggtttcttttaatgaaatccttaaatgttttatcctgtcttatcaacctctaagaaaacctggaataacatactgcaattataagggatttcctctttaaaatcccaaagtttctgctcacaggtttagcagctgatttttaaaaatatcctggcccatgaattcttttatattttctgcactgattggacatattttaaaatagcattataggataatcaagtatgtttctgcttccatgtgaatttgcctatgttaaaactgaattagagagcccgtggtgataaatgatatgatgctgtatttggggattgcagatggcttcagacatggttgggtcaagacactcaaactcttttatcagaataccatctctgtctttctcaattctgctttcctttgtgttggtttggttttattctaaagcatattttcccagtgaagtgaaaaaaaaaaagtcctcttagcagctctagacttagattgtcttactgtgaacaatttccgtaaaatgagagcactagtttcctttttgttccagcagtcttaggtatgaccttccttgtttcagcacaggtcatgtgctcatatggaagtaattactatggctgggggcgtaggatgctttttcagtgaggctctagtcatgtgtctacccctggagctctgacagtagaacataggggaggaggagggatagtttctcaaagtttcaagatactccaaaatggcagcagatatccaatactagggttatggaccttcagcaccactgaaatacatatttcagtggttctctctttgggaagataataagccctaatatttgtaaaccaatttgaaaacactgttacataaataatttactttgagttttacaacatcttgtgaatattttataaatgagaaaatggaaactttaagagatttctttagggtcatattaattaaaacacataaaatagacatagagattatagaattgtctgcagtgaatttgagtcatacattaagcttccaggtggccaaagtaaaaagagaaacatgattagaaagaataaaacatatcagctcctaatgggaagtaaagcttttctgactttaagatatgtaagaaatttatcttgtggcagtttgtatacagtgcttttagttatctcaagaacatctttctaccaattgtaatttttaacacaatttcctacattgcttttcaatggaagcgaagaatctaaagtgcaaatcagcaaaagctaatcctagtagaggatagaataatgaggttcaaaccattattgctgatgcctacttgtataccacatcatttgtatacataaaggaaatagaaatatatcacatcttgtgtttctgttctaacgtagaacagaatatattctatatacaggagtccagtgataaactccttggacacttcagcattttgtacccatcaaattgtgttttgactcaaaatttagttattttcctgtagtacattgctttcaatatatttttaatcctgttaaaggaacagaggcaagtggaaaataaaagttccacttataatgcatgtagttagatatactaagaccactaatttgtaattttttaagttacaatttattaactgagaaaattgacctcgtgacccacatttgattttgtcatttatttttactttccatgtttatgtaagcacacaataaaaatcttcttgtatttttggatttaataaaattcttttaaaaataaaagaataatggcatacttgtatttcactgaataattatattttatcagtagatctcataattaagcctttgaacttttgccgttaggatgtcattgaattagaagtaattgacttccaaaaaactgcaagggagttaaaccaatattgaacccttctttcagagggcagcgtctgttatatgtcaagtaacatcttatagaattataaagcttgttttgatgttttatttttgtgaaagatgtaaattgattcaagtacatttattatagaaaacaagttagctatcaacaatatcctggtttgagtgcactaaactgggctttggaactaaaaggcatttttttattcttctgtcatgtctttctggtaacttaccattccaaataaattaaaactccccattacgtggagagagagagagaaagagagagagagggagagagagaaagagagagaggaaccagaaaaatcattacgatcccatgtacgtcactatagtaatgttctcagggtttgaaagatgttggcttccttgtaatacgacactttatcttgagaaatgtataaacatgggtgtgggaaagaaatgcatcagtggaagagcaataacactcagtaattaagagaaaaaataatcagcatgtaatgtcagagaagaggtgagcttttgtcagaaacttgtctaaccctaagacatatcattaaaagttctaatgcagtagcaaaataatgatagtttagcaggaactttatatgtgatatgaccataaaatgtgaaaaatatatttgtatatctgcatgataaatgtgtaatttatatttgtatgtattagcaacatataccacaaaagaaagcttcagcggcatcatgttttcaaggtaatggtttcccataccaatttatatctcatgtaagggaatttttctataggaagtagataattctatgtctattatagaaaacttaaaataaatgtatttttagtcattatcaagttttcattcttttctaatattgctaagcagaattactaactgtttcctcctctatgttctccttgcactaggttcaaaccactaggacagcatttgccacattattgttccactaatgaaccacctcagtggtaaggatattaatatcagaggttttcttgctcatcttgtattcccagtgcctgttaagagtgccagatgcacattaggtgctcagtagtgagtttgttgcatgaaccagttgataaagtcacattgggtgtagattatagctgcaattcttgccctcaaaatggtcataatataaaagtagacagcttctgcacagcaaaagaaagatcaacagaataaacagacaacctacagaatgggagaaaatattctaatatccagaatctataagaacttgacaaacaaaaaacaaataaccctactaaaaagtgggcaaaagacataagcagttacttttcaaaagaagacatacaagtggctgagaaacatatgaaaataagctcaacatcattagtcatcagagaaatgaaaatcaaaaccataatgaagtaccatctcacaccagtcagaacagcttttattaaagactcaaaatcaacagatgttggcgaggctgtggaggaaagggaatgcttatacactgtaggtgggaatgtaaattagttcagccactgtggaaaacggtttagagatttctcaaagaactgaaaacagaactactatttaacccagcaatcccattactggatatgtatccaaaagaaaagaaatttttctaccaaaaagacatacgcatgtgtgtgttcgttgcagcagtatccacaatagcaaagacagaatcaacccaggtgcccagcatcggtggactggataatgaaaatgtggtacctatgcaccatggaatactatgtagccataaaaaagaacaaagtcatgtcctttgcaacaaaatggatgtactggaggccattatcctaagtgaattaatgtaggaacagaaaactaaatgctgcatattctcactcataaatgggagctaaatattgggtacttatagacataaagatggtagcaatagacactggggactactgtcagggaggaagagagggacgcaagggttgtaaaactaactattgggtgctgtgctcactacctgggtgacaggatcaattttaccctaaatttcagcatcacgcaatgtacccctgtaacaaacctgcacatgtaccacctgaatctaaaataaaagtctaaattattaagaaaaataacaaggtacattaatattgtaagaaaaatgtgcggtaagtaagaatcttttgacttgaattcatccttaagagaggcagggcagtgcatggactctgcagacataatatttgggtttggtctcagctctgttatttactagcagcctgactgcagaaaaggaattttactttgtgggtttcagtttcagtcattttaaagaggactttgataataatactatctagcatagagttgttatgaatgcaaatgagttggttcccttagaaccctgaaagtagcatctgacctaaaataaatacttagtgataattatctaccagatccttgggccttttttcttttcttttcttttctttttttttttgtttgtttgtttttgagaatctttagaaatactaattatgggcatttttacccaaaattaaattttagtgtttcttcattacctgaagaacaaagtttttgttgtgtggtctgtctgtctgcctgcctgtgcgcctgtctcttctcaccctctatctccccagaactgagttgaagactagtgttaggagtcgtgatagtttgggatacagatagagtggaaagtaggtagttcaaaagtttcagagtattgcatgttacgagttctctgtacccacttcttaaaaaagaatcatattttctacatggcaattgattggaacagagaaaaagccagttttttttttttttttttttttttttgccatagcagattcagagcttacgtaatgatctgggaaattcatttggaaaactgaaatcacaaactagttccatctttccttatcattggatatcagaataaatttgaatagattgagtgcaaaggctaagggtcaaataaatacctattaacatacagaaaaaggcagaatgataggtgcaagaacaagggtattgcccagggaggaaatggtaggtggagtcaatcagtggggaaagaagggatctcacacccggaagcccaggggaagttaacaagcactcctgggagttctcaatgctttgagaagggcaaagatgccaacaaccatttctctcttcttcaaagatgtttggaaatctttaaaatgggatatttaaccatctgtcttaaagtactctctatcccttggcaatactacatgaaatatgtagttgtaatgtggccacattttcttcaccagaatcttttgcaatagtcagactccatggagtagagatatccatctatctgtaacacacttgaaggagaaattgataaaggtaacaatataaaggtttcattaagaatgactaaattcacctcatagattgagaacctgacgcaggttctcaataagttagaccaaccacacagggtgcttcttaatttataatttcttctcactgaggaatcaataaatattttagatgtgcttaataaaaatatttctttcctgatctgtttccagagcatcttctctttctattatgtgttcatctttttttttctacctcattctgttcatgctctaggctggtagcactgtcccataaaaatataatgtgggccacaaggtgaaccacatatgtaattttaatttctagtaaccacattaaaaagtaaataggtgaaattaattttagtagtgtgtacacttaactcaaactgtaataattttaatatgaaatcaatataaaaattactagtaagtgttatagtttgctcacatctcatgttgaaatgttattcccgtgttgacggtgggcttagtaggaggtgtttaggtcatgagagtggatccctcatgacttggtgctgttctcacaatagtgtgttgtttaaaattatgtggcaccccccaccccttgctccagcatttgctatgtgacatacctgttcccgtttcgccttctctcatgaataaaagctccttcccagaagcggagcagatgctggcgccatgtttctgtacagcctgcagaactgtgagccaattaaatctcttttctttataaattactcagtctcaagtatttccttatagtaatgcaagaatggcctaatataatatgctagtttacatttttttggtactaagttctgaaaatacagagtgtattttacacatagtttatctcaatttggactatccccatttgaagtgctcaacagccacctgtggctagtggctatggtattgggtggaagagctttaggtcttctctgttggaaacgctactttctttcttttttttgagacagagtctcgcactcttgcccaggctggagtgcagtggcacgatctcggctcactgcaagctccgcctcctgggttcgcgccattctcctgcctcagcctcccgagtagctgagactacaggcgcccgccaccaggcctggctaattttttgtatttttagtagagacgggctttcaccatgttagccaggatggtctcgatctcctggcctcaggtgatccacccgcctcggcctcccaaagtgctgggattacaggcgtgagccacctcgcccggccggaaacactactttcttaggttcacgtaaaaaaggctcctgcctgcacagatagaatggcgagaatggtgtgttttatgtggtacaaaccgaatgcttgtgtcttcccaaaattcgtatgttgaaacattaatccccaaagtgtgccttaggaggcagggcccttgggagatcattaagtttagatgaggccataagggtggagcccccatgatgggactagtgctcatacaggatgaggaagagacaccagggcttcctttctctgccctttgagaacacagtgggaagcagccctctgcaagccaggaagagaaccctcaccagtaatgaaatctgccagcaccttgatcttgggctctgcagcttctagaactttgagaaatgaatatctctcctttaagccaccagtctataatattctgttatagcagcccaggctgaccaagacattgtgtaggattatctccactcccctggcaacctctcctcactccagccacaactccctccgccccaaaaactatcaatacctggtgattgattgctgaaccattttattataatgattcagttacatcatgcattcttttgctcctcttggcatttttgatattaatatttcttaattcttagatgctacatgaaagcatgattttagaaaatgttgacacatgttagctaacacattaatcaaaatggctagctaaaaaataggaattataaggagaaaatgtttattttatagctagagattaattttggttagttgtccaaatataaggcagttgaatttttatatacactaaatagtaaccaataaatatgaattttgaccttagctataatattaatgataccttcttttttggtatgattataaaacaaaggtaacatcctttgcttttgtatgcaagtctgagcttatagtaccctttggccccaaatagctttatggaatattgaaggctgcaatgacatactggggtttttattgactcaatactgtgaatgagtgtacatggagctgtttcccagaagtggtggaagatttacatgcctttttattttggagagcaacgtttccccacagatggtgaaagaatgggcacaggtgcgtgaatatattgataccctcagccgctagagcagctgagttttgccagggggtggcccagaacctttggctgtcacttcagctaggagcaacctcatccattatccccgagcatagtgcaaacattgttccctatatgagccaagatttgctaacgtttggaaaactctgtcattgtagatccaaatctcacttcactttttaaaataaatgagatcctactcaagatagaaagcatgctaaaatgtctgtcatttatggtattttccctgacatccctttccacgagtcattgtatcttccgagttttcaggtttccaagtgaactttatcttcttcttctccttaaacctattaaataaatgtttctcagctgaaaaaaatcccataccactgttaataattaaaaattattttaaatattatttgtagcaaaaaacaatttggagctaacaaaaattaatttaaacaaagggtaaataattattttattttcaagatatatatgttttctcagttttgatatgtagtttggtgatatagtctctctaaaaaatcactgacaatagctttcattctgaaatattggtaagtcaagtatgacatatttttatttgctcaagaggaataagtttgagtattatcaattcttctttctttctttctttcttttttttttgaaatggagtcttgctgtgttgcccaggctggagtgcaatggcgcgatctgggctcactgcaacctctgcctcctgggttcaagcaattctcctgcctcagcctcccaagtagctgggattacaggtgcatgccaccaagcctggctaatttgtgtttttagtaaagatggggtttcactatgttggccaggctggtcttgaactcctgacctcaggtgatccgcctacctcggcctcccaaagtgctgggattacaagtttgagccaccacgcccagcccctatttcttattagtcatctgatgttctctttcttcaccaatgtgtttaagtgttatgctcttaatgttgcaataacagagtaggtctttaatactcttaaagaggtacttcaccttatgtgatttagtgagacatgcagaaggtgaagaagacactcaaggtcagggagagagttactgtggaacttcaagtcaggtctctattgttgtcactggtgtcgtggagagactttcaagcttgctttcattttttattattctactaagtaccctttacccacagatatagtgacagtacctcaccagaatttaaataaaggatgctctggttagcatcacaacatagaattgtctttttaaaaaaagctaaaaatattacttgatttcttcagaaaaaacattgtagtttagtgccacaaagctgtagtggcagtatgtaaaatattcagtttgtcaatgcttgcctggtaatggttccattagaaacattgctttatttttgatcacaaacattgagttacaagtaaacatgaatatttttctagatttattaaaaaatggaaggactgtcaatgtataatcaagtttcttgattctttaatagactttttctttttgtttacaatagttattttccttaaaaaaaaaaaaactagatcattgatttgatatagaagtggaaattgcaagaaaagaacttagatggccaaaaattgagttgaatttgttgaaataaatatcaacatgctatactggatatgcatcttaaccttctaattgaagttatgcttgggggtaaaaaccgttccttttattttttctcttgaggacaagtcaagatatgcctgtttttatcaatacatttaaatttgatctccacataaagcatttagatgcatttgtataatcctcattaaatctggcaagtgtgctctgcctcaaagccagcctctgcaagaagttacattcaaggacataagtatgactccagaagccttgaagaataatatatagaattttaggttatatttccttctgtaaggaaaactatatgcagcttatcatagagcaaacttcctaacagttctctttatacctctctccatctccccaaagtcttgcactcataacagctgctaaaaatctctcctgtactcctacgcagtctcctcaccaacacacagtcaccagccacttcctccttatccctctccttttccaagccatcttggctcttcctgctgcttgcagcatttttttcagtcattcagcaagtatttattgagcaccttttatgtatctgacactatccttagtactgaggatagaatggaacactataatctccacttgatctgctagtctgctccttttttttttcttttttgtttgccggaacaggcaggttagaaaagatacaactcaaaatagcttagtaaaaagggaaaaagtactgtgatggcttatgtaactgaacaggtgtgtcttggttcagaactcagagtccgctatttttctactctgaatcctctttttttttttttttttgagacagtttcactctgtcgcccaggctagagtgcaatggtgtgatttcggctcactgcaacaacctccacctcctgggctcaagcgattctcctgcttcagcctcctgaatagctgggactacaggtgtgcgccagcgtgaccagctaatttttgtatttttagtagagatggagtttcaccacattggccaggctggtgtcgaactcctgacctcaggcgatccgcctgccttggcctcccaaagtgctgggattacaggtgtgagccactgcgcctggccatacgctgaatcctcttgataggcttcattttctgactctgccagctgtccttgcagagttccaggctcacagcatgataacacccgatccagtgtaagagatactccacttccagcctgctgcagagggaattttagaattgagcttattggtcctgattagcctgacttataggtctaatactcaatcctgaaattgccactgtggccagggaagggaatgtactgctaaacctgtggtgggcttcaatcctggatccctaaggtagagataattttacttgaagcaattggcctgagaatgtgaaagggctatttgtcctggaaggaagtaagtgtgaatgcatgctgggtaatcaaaagacaatggttcacgtcacttgttttagtactatttctctgcaggatccaacctcccctcctcatgctaacaagtgatatctgtcttgttgcatatgaattattagctttatctgtgtaatctcagagtcaatgcaggaatttcatgtcctagatgaaggattcttgccttcacttgagtgtccccagagatagagagctcactgcctggcgaggtatgctgccccttgtctctatatgccatagaatcaggtctctgattcattttccactccacacttggcttgatatggagtgacaaaaaattcatgaatgcttagaattgatggttctattattcttcaatcatggtacagttaaaaacgttgcatgtagatacatgcatgatatgacaagactgaactactctgacttgtatgaccacaaggtaaaaatctaaagtattaaaggattttgtttccatttgctctaatcttaaagaaaaaattttcaaggaaagctttttactctgattggagtggtgatctatgataatacttacagaggcttgcattctggtaacatgcaaatttgagaacttcaaatataattttatgtactaaacctgtgcttacagaagaagctgttaaatatacaactaggattgaatgtaaatgatgcatctttagtttcatcttcctcaatttcataactgatttttgtgtagctttcatatctgaaaatgagtacaaatatggagaaaataaaaggatctttcctaaacaatattctaacatttttaaaaaggttgcactggtaatgcaaacagataaagtaatgaaacttctcagatagcaattatgtggcacaggctctgagagctaatctctcaaagagtcaagcctagtaagataccagagataatatctacatggacagaagattgatagcttctttgacaagagcaaatatattgctttgggcttaaagctcagcaccttcccacaagcccttagcattcatgatccactccacacagaccttcacgattggatgtgtactgtcctcctaggaaatcctataggctaagttggacataaaagggtgatgtgtgggttccctctctcttgtacccatatctgggcatgtatctattatcctcaacaactctcaaagtgccagtcaatcaaaacataggcacctctatcttgctggcagtctcttctagctcctttagctttctcagacttgaggaaggcacacatgtctccaactgcagaaaacatatttgaagctttctaagtgctctcatggaagcccctaccctagctcaaagtagaggtagcatcctgcccaagttgcttgggggaaggggagggtatggaactatagttctcatcaattctcttctttctctacattctaaggtgtcaaaagtgttgcaaagctgttttgaaaattctgccttttattttggcatctcataggatcaagtgcagtagttttcaatcctatccaacccaatagactttttaaataatatctttttatcatcttccttttctaccattgaataaaactcatagaaatacaatctacctgcatatatgattttaaagaatcaatataatacctaaactgtgaaataagagagaaataaaattttatgtatgtagtaaaatgatatgcatttcagtatttaaatactcagcatggctccactggaaaagaaaaggaaagaggcagatgcttgtccttacttggaatgaataaatttagatttaggaaaaggcaatatttagttgatggtcaatccttcttctctataattattattttaaaacaagcgacaaataaatgtatttgtagttggatagatgggggcagagagagagggaggttctttcaacatgaattcaacagctataaatgcagactcatctgtttgaaatattagcaattcaaatcccacaagtgatactgcttttagtaacatactctgaacttcttactaactcccagtacctccacaaagaaaataaagcatcatacaatatttcctctactatacagtagtcagaatcctagaaaatttgatatatatgaaaactatgacaaaatgtgaaggtttgtcatgtgttggatattataaaattgcacaaaacacaggacaattcttcattctgtggggctgtactacacatttcacaacacccagtccccttggtcccaacttatagttggaccgccaatcacagtaacagtcagtaaaggcaaaaaaacagaagataaacaataaactctaaaaactatcccgtaggggagtgtggcatgctccctttcattgagaattactaatttattgtctcatgatggctaggacaaagttaaatgttatacagtagtattattaagtttattacaaagatcatattgtattaatccatttttgcactgctataagaaaatacctgagactgggtaatttataatgaaaataggtttagttggctcatggttctgcaggctgtacgggcagcatggcaggatctgcatctggggaggccttaggaaactcacaatcatggtggaaggcaaagggggagtgagcatatcttacatgaccagggcaggagcaagagggtggggggagctgctacacacttttaaacaaccagatcttgtgagaactccagcaggagaacagcaccaaagcgggagatccagccccatgatccaatcatctcccaccaggtcccacctccaacactggggattatcattcgacatgagatttgcgtggggacacaaatctgaaccatatcacatattgaatgctatctgccagtttttgcattaaaaacattacatatattattttgttttattcatttattaattcatttgcttattcacttaacaaatatttattatgtgccactttgtggtaggcagtgttctttgagctagaaataagagatgacctattgtgttgagtacatttcatgcatctgtgtttccttttgaaacaaatatcatggatataatttctattatttattaatattgatttttatatgtatgtttatgctatatattaaggttacataaagtgatttggatatagtcatttttacatggattcaatcgccatccttgaattaacttgttatacaataacagtgaagtacaaaagtaagtcagctaaggttttgtgacatcaagccagtggtcaggatttctagaagcagcaagctacagatacttgtttcttgcccttttaactcaagttcccataaggagcagtaaataaaagtcatcttatgtatgattaggcatattactgaattgacactgaggtatctgctgggttcttcttgtgtttgcttttatatttactgtacttggttattaatatttttcagttattaattttagagttatatgaaataagttactactcaaacatttttatatccttagtcacaactataaaatatatgaatgtttactgacaaacgataagtaatatataatgccatgtaatatcatggaaagttttatgtaagccacgtgtatattttatatatattctctctctctctcacacagacacatacatgcacacacacacatttttttcctaaaccttttgaagtaaattacaacttacatcacagattgtggttctttaagtattcagtgtggattttctaacccgattacagtacagttatcaacttcttaaatttacattgataatctcccatttgtttagtacttttattgttttttatatttttattatatatttgataaatatttttataaatattatatattattttttctggatacttttgtatatatttttaaaatagtttttaaagagacaactttctagctactctaagtaactgtcttaaagccattagttatactcaagtagtaatagtatttcatataaatcagcaccagatagatccagttaaaacataaacaactgataggaggaggagggctaaaaaacctggaaaaaagactcactacttgaaaaaaacgtcagttcagtttactctttccatattgacaggtccttcattgctgtcttttttcttctgccacacaaggagaatgaaaataatagcttccaaacaaccaaggcaaccaaggctttcccttcacttcttttgaataatgtacagacattgaatagaggtgcggtgaggcagcgtcagctattaagagttaagtggtcagggacttgctccagtccaagcctggatgttgaggaaaaataaacatcaggaaatgtgttttataattcaagattctgggtgaattgataaatattatgccttgcacaacctaaatagttgtttattataaaaggaagctctaatttcctgtttaatgtaaaaacttgattattttgagttttatagttggctgtttttactgagtatattttagtaatagtgcagaaaatcattggcaaaattaaatcaggcaatgatttttcttattcaagtaaaatgtgcttccgttgtgctcttgggcttgaaggacatcctccctatctgagacaatcatcattgcccacttccccaaacaaccagccgtaacgtgaccagctccctgtgcccctccggctgcttcatttccagccatgaagtgcataataaaatatgctgcagccattttcaagccagattagcgtttttctccagaatttgtcttttccatagacttctgttctaactactcatttccatctccttgatttttatcctgttggtgtcttgcccagatttttttctttctgtacactctttaaattgaatagtatttttagacagcctactcagcctctctaccacagtcttgaggcatatgatgttccacattcgacccagtttccaaagatatcctagcccaatcttgatctcagagccccagatcattctgttattttatctgaaaagtgggcactggatggccaagatgtaagcctccaagtttccgcctgtagtatactaaggctttttgtgggcagagaacttaaatttgtagaatcagccttttgtgttaatctctacagttgctcaagaaatatttgctaagcatttacagagaatcagacattgtgttatgtgttagagtttcaagggggccagtaaataggacctttccccctgctgtgcctggaatctcaataatttaagaaaaaaaaaactctgaaaagcagatggaagcaaaatatcatctctatcatttatagatcaagattagagtcatagattcatgagagacccaagcgaaccaatgaaccaactctcagaattaggaagacctacccatgtggtccctgcagtcctggactagggcaggcagatcttttctccacagggatttaggctctagaggtgaagggagatacttcctgctgtgggcaggcaactcccaagagggagtatggtacacctgagcattcctgctaacttttctcaagcttccacttctcttccccagggaagagtgagtaaatggacagagagatgctagaagtatgcttagcgaatcgtatctccaatgtcaaccaggagcggagtatcgcaattctcttctaacagaatgtactagagatgtagtgttgtgtagacatgattcccccccatttccctccgaatggagttcgtaatcaggtgggagaaggcacattttaaacacgtaattagaaatgatgaagaaggatgcaattcttttgtacattgtactttcagggggcagatcttggacgataaattgcatgtcttttaaataattttttttatgagtcacagagttttctttacctggctaagactggataaatactacagtactagggttttctttctgtgtgtatgcatgtgtgctatagtctaaccaccttcttgctagtcatagtctttgtttacattagacacaatacaattaattgtttcacttcactaaattatagtcaattttcagcctgacatcatagagattatacccaggtaattttaatggagtgttgggtgttccaaattctttggttttgcatctacagggaatcttttgatttacccatccgggagctaatcgtattcattctgtgtggatttttacaagtttaaacctcagatttgttttcttcattttaaaattcttgggaagtgatttgtggaacccaaatagatgttcagaaataaccattctttatcagttcatattaaagatatatgattaatttataaaggaccaatgattacatagtttatattttaaagaaaaagaaatatgtataagaaatgttagcaaagcagtgagatgagagaaagaacactgttaaagtcaaccacagagtgtttttgaaatttcactacatgtaaagaattcctttggaaaggttatgccatttctaatgccaagttttgcctcattaaacttttaaatggtaaattaacaatggttgttaaattgctaactggcaaaaataaccagcaatggttggtaaactaaaatagttgaataacaagtaggaatttgccaattctttccccagtagctagtcaataaattggcaatattattatttattaattatttattttattttcattgaaatttattttattttctaaaactgagaaagatatgtagtaaaggaatggtaaatgaagggcaaagtatgaaaaaaagtgttttctgtacttttaacatcctcaataaacctactatgctaatgctatgcccaagagcattatatatataagaaaacaatttaggtgtaattaaatgtatcatatctgtttagatatatctaaatgcatcatatctgtttagatatattatatttaaatgtatcatatctgtttagatgtactatatctgttttttcctttttctctctagtttagatgaaagttgttaaaactttagttgtattctttcaatatagctgtgtactacttaatttcttgctctactaaaatgttgcaaacagagttgtcataatttctgtgaaatatcataaataaaacacttttgtcagcttgtacatctaatcctacagttggcaaatctgtcgtctccacattgaaagcatattctgagtgcagccgcttctctttttatctgcccctgctgtcctcctctaatgtaatgatcatctcttgcctcagctgatgtcctaatttgtgtccttgcctccactgtttccacctagactctagtctgcacatgccttctgctcccagagtggtcctagtgtaaatcaggctcgctttccgcacttcatagcttcccactacatagaataaagttcgggggagtccttaccaagccttctggctaccctatgggcctcacttcctaccattctcccatccatcgctggccttcttgctgtttgtttgagtacactacactctgtcccatctcagcgttcttgtacttgctattatctttgccctgaatacacaaacctttctgtttaaatttatttaaatttattttgtgcctgaaaacttatatagcagggacttgttcttgcagtttttccagttcctggtgtagcacctggcacacagatggcactctaaagtttataaatgaataatgtctgatgaaaacatcaaagctactttctagatttgtggagattgcccagataaatgaagtcacggtaaaaggtaaggagagattttatgtttctccaacacttgtaatatttaaatgttctgtagaaactattgagtacaaactagtctattaggcttcgaaatgtaggatgaaagaaatgatatgtcttctgagagatcgaagaatgagagcaaagagatttgaaggattaaaaattaatcaaagaagataaatcaggccattaattcttcagaattaatatgcatgttagtcacacattttgcccttttgcctttcaattgtgtgtgaagtaaattgttatctctacatatgattacctaagttttctttttgtaaatggtatttaattcttttagaaagtaaactttctacctttatcaaatgtaagcttaaaggataaaataaaattaaagaggaaaatattattttattctctattagaaaacaagccaagtttctatgttttgaagacatgtcttggtgttttaattagaatacctttggttaatatttcagcttgaagtgatataaaagtacaataactatttcactggttcatacttaggtcatattctacataaaattaataactggtttatttttggcattaatatactccatggaaaaatataaaaataaaaaccaggaaggaagtttagttcataaattgtttagctacctgtttatcctatgctaaatggaaaaagaagagctcaaagggtaaatgagtagaacaggttacattctacccttgactgtggaaagcttgcttaacaggcggacagatcctgacataaacttgccccagtcacacagcccagaggcaccattgaagggctaaaggatttgctgcttgtgggctgcatagtctagactaaatactcaacacctcttagggagaagtttactgtaaagagcttggacttttccagtcttatagccaccaaagggaagggaaataaaagaacaagacttcatgggaaggaagcctaatgtttgcctgagattacatttattttatttaacatttattttatttaacatttacttatatagttcttacactatgcagaatgaggatcttctaagtgcttaaaaattcttaactcaatttactatttgtactaattttatgagatatgtagtttcattattcttattctactgatgaggaaaataaagagaggttagacagctcactcaaggtcacacagcaagtcaagagtagaagaagcagtgatgtgaacccaaggatttgtctctggatccctgctcttaatactccactgcctgtcacgttgaactaaaacagtggctctctgacactactgagaaacagaaaaacagaggttctctaacattcatgagcagcagaatcaccatgacaggaatgtgaggtgcaggatgggaatcaaaaagatcatactctcaaagaaatgtatggccatctttggttagtaacccaaagactatatactgccatagttgctgcaagtgaatacattcattcttaatttagttacacaccatgtgtttattgcgctccgactttatgccaggcactgggctagcatctaggtgaacaagcagtcacagcccatatccgcaaatgcttttcggtccacaggtgagagagctattaaacataaacagacacataaaatagataatcacaaactgtgataaggtctgagggaaagcaatagggtacaattagaataataagtaaaagcttaatttaacaagtcatgtggggctggccaggcaagggtgctctgagaaggttccaggtaatcctgaggtctgaagactgagtggggggtcagtgccaggtcagtgtggggtaaggagttatgcctctccgaatccactttccacctccctccattcgtctctctgctctgaggctgatctaaatggactacagcaggtggttgtatctcagtggtcctcacctaggggttattttgcaccccagggacatttggcagagtctggagacatttttcattgtcataactgggaggcatctagctgacagaggccaggatgcttcttgctaaacattctacagtgctcaggatagccctgtcccaatacaaggaattattggctccgaatgtcaatagcgccactgtagagaaaccctgaggagggaggaaaaacaatgtcaagggttttattctcccattcctgccccatagagttagcctcagttgactgcatctcttgcctgaatgtgccccctcctcacaaaacgggtgactcttctggactcactccttgttgggtctaggagtgttaagcactatccactgtgattcctctatacccacatgtttgtaaaccgtccctgtgtaaataaatgcacctcaaattatccttttaaactatgccatctgtttcttgttgggaccctgagtgatgcaagtgtgttctggcagaagacagcctgtgtggggactccacaagcggagccaggggagagagactgctcctgccagagacaccacataaggcagagaggcagggacacgaataccttggcttcttcctttctcctgccttccagtatcctgcagtgccttccattggctgaagccagttgagagacagctaacatgagtgtctgaaaatgcaggtcccaggagtcagtgaagggcaaggatggatctgagggtaaataggcccgggacctgcacaaggagagcagccctacagtgtgaatattagaaggttactgcagcagtctgtggagagcctgatggtggtttggattagggttgatggagccagagagaaggcaaacacgtgtctcccattgcctttggacttgtagtttgggaaacacaaacttccatgttacaaggccaggagggtagtgaaggggaggcatgcatgtgtaaggccatctggaaagggcaaacagcttctttcaggcctaaagccattaccaggttggaatgtggccccagtactgccagatcctcaaagattccaagagaagacaagtctccagattcttacatgaaaattttcaatttttaaacagtgacactaatgaaaacacatgcactgtgaactgaactggatttggctcctgactctagagtctagaacaatgagtttgcaacctcaacctactgagggttgttacaaatgaggcgtctattagacagttcccagctctgcttcggtctctcagtctctctttttcttttttaaatgcaggatgtatgaactagatccagtgttttttttttttttttaatgctttccaacaaaaagtacagaaacaaattttattctgggaatgacagaaccacaactgtcacccataagtcaggattgaaaatgtctggctcatccaaatagccacattgtgttcattcttcactttcactataaaagaatggtacaaatgtaaacatgcataatgtatttatcattaataaaacattgctttacagattttatacactggactctgtgagattgttttgaggaaaagaaaaaaggtttttatttaaaaacattgaaaacaagtaggctagatgaatgccctaaaggttggtgattggaaaactgataaccagaaggcctgaagctcagggctaaaatggtcagaaaagcttgtttgtcagtggcagtccttatctataattgacctattcactgtgttaaggcttgtgcaaaggcagaatttagggcttaattactccaagcaaagtcaacaaataattgtgaaactgtatctccagaggagtgctgatgtcagggaaatcagacctgcaaagagggtggcaactgtaaacctggagaccatagtccaacatatgacagaggctgagacaaacaggtttttttgggggggttttttttgtttgtttgtttttgttctttttttagacagagtttcactcttgtcacccaggctggaatgcaatggtgcaatcttggcccaccacaacctctgcctcccagattcaagtgattctcctgcctcagcctcctgagtagctgggattataggcaccaccatgcctggctaatttttttagagggggtttcaccatgtttggccaggctggtctcaaactcctgacctcaggtgatccacccttctcagcctcccaaagtgctgggattacaggcatgagccactgcgccctgccgaaaaccaggttttaataggaaatgaaaagtgcaagaccagctcggtcagggataccctaacccagcggtgctagaggaattaaagacacacacacaaaaatatagaggtgtggagtgggaaatcaggggtctcacagccttcagagctgagagcctcgaacagagatttacccatgtatttattgacagcaagccagtgataagcattgtttctatagattatagattaactaaaagtattccttacaggaaacaaaggaatgggctgaaataaagggatgagctctggctagttatccgcagcaggagcacatccttaaggcacagatggctcattctattgtttgtggtttaagaatgcctttaagcggttttcctccctgggtgggccaggtgttccttgccctcattccggtaaacccacaaccttccagcgtgggcgtcatggccatcacaaacatgtcacagtgctgcagagattttgtttatggctagttttggggccagtttatggcgagattttgggggcctattcccaacagaaaagaagttcagtaacaaaaaggaaacccccaaagctccaattcccagtgaatcaaattgttttcctgtttttgtgttcccttttaggcattattcacatgcaaaatgatttctacaatatagaaatgctggtagtaaagttgtgatgcacgcagatggagatggacgtttcgtccctttcagaccttaaagtagtaatgatcctgctaggccgggacttaaggaggattcgttgggctgcagaataaagttccagatccttaacatgggaaataaacaataatcagtttctcactttcccatgaagcctcagctctcaccacacatgcactgctgctcttggagccctgtgctttttgtgctgtgaccatacttacctacatttccttacctcatcccaccagactgttccatgctcccttgagcatatgccgccacttccttatggaaagttatttcaggcctacatttcaattcttccatgaagcctttctcaccctcaggtagaactgtttcctccttatttctctttacagtttgtatattgcctgtagcaattcatggaacatgtttaaagcctgccctagtcttcttaagggctgggtccatgagggatttatgtgactctctcccgtgcctctcccaaggcctatccagtgccaggtacaaaagcagtaccagataactgttcagtgactgaatgatatcttcgctttgtggaattttcaaggatgtcagagcaaatttgtaagattgttgcattcaatcattcaccaaatttttacataatgtactctagtatattttgggcatttgcccaggtgctgaggatccactgataaacaaaatatcatcctcatcctcacacattttagagggggagacagaaaatgaacatatcaacatttaatatgtcgaaaagagtaactgctgtaaagaaaaacagccagtgagtaagggatagaggtgatgtggggtactattttagacaggcttgtcaaaaagtcctctccagagttcagtgagttccgaatgaactgaagtgtgaataatgcacacgttaaggaagagagttgcagacaggaggatcagcaagtgcaaaagccatgaggtggaagcattcttgacttgtctgagaaactacaaagaggccagtgagggagagaaggagctaggagttggagcatgtggggcctggcaggctatgataaggaatttacattttattcccagtgtgttgtcagccattgtggggtattgcatagggaagagacatggtgtaatataagttatcacatggctgctgtgatggttaatactgagtgtcaacttgattggattgaaggatacaaagtattgatcctgggtgtgtctgtgagagtgttgccaaggagattaacatttgagtcagtgggttgggaaaggcagacccacccttaatctgggtgggcacaatctaatcagctgccagagcagctagaatataagcaggcagaaaaatgtgaaaggagagactggcctagcctcccatcctgtatctttctcttgtgctggatgcttcctgccctcgaacatcggactccaagttctttaattttggaactcggactatataatatatatattccattagttctgtccctctagagaaccctgactaatatagctgctctgagaatagactatagaggaggaagagcacaagctgagagacttaaaaatgtttattcctaatattgttcattcttgactgctttagtgattcaccgattcattcagtattctttgattcaacaaaaatgtattgaatttttactatgaactcttctgggtatggtggatatagacataaatagaaaggtccctgctctcatgaaacttacactctaatgagggaggtactccccactccaagtaagatttgagattatacagcccttctggctcttctccttcaccaaggcctgcagctggactgggaaactcctgactgcagaggcacagtagaagtgccattatcattgccaggtcagcttctctgcagcacttggagaatcatgagaatcaccttttcttctggaactccaggtcttctggtagttgggcagtagagctgtactggaagctgctatagctgtggccacctatcctcagagattcctgcaaaagaattgccttaaaccacagagaacctggatgtcttttacatcagagtgctagtgttaatctgatgagacaatgacaatcttaagcactggcaagacttcatgaaagacttctttaatctccttaagatagcgacctcacagggaatgactggctgctgtagaatttggatgagcctgagggctttacttatgaatgacatgttgcacactcagccttggaaatggctgcctgcttgtaaagccattgtgcttcactgactctgatgggctactctggagcagggatgcccaacaagggccaggagggatccatggggagacttccccacagaggtttttcttctgtgattgcaaagtttagactggaataaatttctctttagtggtttcatttaggaatgtagaaataggttaaattgaatttgaattgttttctttagtttcaaaagacatgtcagaatgtgttcttcttcaaaatatttatttaagagactcgatttagctttgggaaagtgaatggttgtttctcatgtctaatgctaggaaaacttaggcaactatcatagaatggatatgattaattatatacgtccttaataaatatggtttcttcctatttttctaccaagcactatgttaactattagggaggatgttatgcctgagacataatttcagcaagctctcagtctaagcagagaccataacctttattcaacaaccaacttaaatgtgttattttgacaaaaattttgaaccatctgtaattcacagtttctttcttgtgatgtcttaatatagtgaattggagtctccagattttaggaaactttttatgggttttacagtgtttacttagtctttggccttaatttcatgatgtgtacatttccatctattaaaaatcagaattaccagcatgttattcacttagctaaaataaggacttacttaggcttgctatgttttgtttttgatattctggaatatattctgacaagcttttgagtggggagaagaaaagataagtgctgtttattatttagtagtaccttactaaactcaaagataagccttgagatgctctaataaggggaaaaatggaataccttcctttatgttagaagcaagtgatgttattgaaagattgctgaagttttagttggcatatctcaatttttcctacaaactgagtgtgaataatatttaatggtagaatgagataatacccagaataggtaaacaaatgttaaagaccatagcacaatcctgcacctagtagacactcagttatttagtgttaaacatgtggaactgagagaattaatttatacttacatatccacttcattagaataacaatgagttcacagagttcattacagaaagttgtatgaggttcacacataagggaaggaggtacttgctttattgattgagagagtgttttctatttgactgttatatttattagaaacagaatcttctttccatttaattttttttttttttttttttttttttttttagagtggaccttgctctgtcaccctagctggagtgcagtggaatgctcatggctcactgcagccttgacctcctgggctcaagtgattctctcatccctaccttccaagtagctgggaccacaggtgcatgccactatgcccagctaatattttctgtagagacgaggttttgccatgttgtccagacttgtcttgaactcttgggctcaagctatccacctgccttggcaccccaaagtgctgggattacaggtgtgagccactgcacctggcccttcatttaatttttataagttttggtagttgaacttcacttctagtttgtctattccaaattcatcactgcaagctcttgcaagttcttggtgttacttgtggtagtgagtaacctggctcatttttctatttgtattgtagatctttggttaacagtctcttcattaccattggctggttccttttgtacgtttctagacatttctcacaaaatatattgctgactatgatatgtgtgtgtatgtgtgtgtgtgcacacatttctgagcactctgatcaccccagatagaaataatctcttttttccaagtattcattgctttattcccatcactgtaatgatttagcaatttaaaaatccctcgcattataatcattcatgtctgtgtctaaaaatcattgagctccatgaaagagcagaagcaatatccgaacacgtttttgtcttgatcatgtagagtagatgaattcaatgaatatttgttaactggatgaacacgtgtgcttgtttgtgcatgtacacatgcattcataatatcattgtatttcatttctatagatgacgtcttcaatcagagcgtacatcagtgtttgaaaagactactaccaatattccttctacgttgtgtatatgaatggggatttcagtttagggactgtagctatttgaagaaactcagaatttgtctcttaaattcacggttggcctaaagagcctgtgctcaaaaaggagaagtcacattccttatagcggaacatcaggtgtcctattagctgctgtttctcagcagttcacagccatgtcacatttttaaaaagctgtgtatgccacatccttgaagggcttcttctgccttttctttttggggatttctctgcttcagcttacaaggtcatagctgctctgactgccacctttccataggctccacacaggacaataatgattggacagtgatttagtgctcccgttctgagtgtgtgcaaagaccttctaatgagggatacatctttttaaaaattttttttttattatgctttaagttctgggatacatgtgcagaacgtgcaggtttgttacataggtatacatgtgccatggaggtttgttgtacccatcaacccatcatctacattaggtatttctcccaatgctatccctcccctagtcccccacccccaacaggccctggtgtgtgatattctcctccctgtgtccatgtattctcattgttcaactcccacttatgagtgagaacatgcggtgtttggttttctgttcctgtgttagtttgctgagaatgatggtttccagcttcatccatgtccctgcaaaggacatgagctcatccttttttttctggctgcatagtattccatggtgtatatgtgccacattttctttatccagtctgttattgatggtcatttggattggttccaagtctttgctgttgtgaacagtgctgcaataaacatacgtgtgcatgtgtctttatagtagaatgatttataatcctttgggtatatactcaataatgggattgctctgtcaaatggtatttctggttctagatccttgaggaatcgccacactgtcttccacaatggttgcagtaatttacactcccatcaacagtggaaaagcgttcctatttctccacatcatctccagcatctgttgtttcctgactttctcatgatcaccattctaactggcttgagatggtatctcattgtggttttgatttgcatttctctaatgactagtgatgatgaactttttttcatatgtttgttggctgcataaatgtcttcttttgagaagtatctgttcatatccttcacccactttttgatggggttgttttttcttgtaaatttgtttcagttccttgtagattcaggatattagtcctttgtcagatggatagagtgcaaaaattgtctcccattctgtaggttgcctgttcactctgatgatagcttcttttgctgtgcagaagctctttagtttaattagatcccatttgtcagttttggtttttgttgctattgcttttggtgttttagtcatgaagtctttgtccatgcctatgtcctgaatggtattgcctaggttttcttctaaggtttttatggttttaggtcttatgtttaagtctttaatccatcttgagttaatttttgtataaggtgtaaggaaggggtccagtttcagttttctgcatatggctagccagttttcccaacgtcgtttattaaatagggaatcctttcccctttgcttatttttgtgaggtttgttgaaactcagatgattgtaaatgtgtggcattatttctgtggcctctgttctgttccattggtctatatatctgttttggtaccactaccatgccattttggttactgtagccttgtagtatagtttgaagtcaggtagcatgatgcctccagcattgttctttttgcttaggattgtcttggctatatgaactcttttttggttccacatgaaatttaaagctgttatttcttgtcatctgctaccttttgaatttgtttgctcttgcttctctagttcttttaattgtgatgttagggtgttggttttagatctttcccaccttctgatgtgggcatttagtgctataaatttccctctaaacactgctttagctgtgtcccagagattctggtatgttgtgtctttgttctcattggtttcaaagaacttatttatttctgccttaattttgttatttacccagtagtcattcaggagaaggtagttcagtttccatgtagttgtgaagttttgagtgagtttctttccttttcttttcttttcttttcttttcttttctttctttctttctttctttctttctttctttctttctttctttcttttgtttgagatggagtcttactctgtcgccagtctggagtgcagtggtgtcatctcagctcgctgcaacctccgcctcctgggttcaagagattcctctgcctcagcctcccaagtagctgggtttacaggcacacaccaccacgcccagctaattttttgtattttagtaaagacagggtttcaccatgttgactaagatggtctcgatctcctgacctcgtgatctgcccacctcagcttcccaaagagctgggattactggcgtgagccactgtgcctgcccttgagtgagtttcttaatcctgagttctaatttgattgcactgtggtctgagagactgtttgttatgatttccattcttttgcatttgttgaggagtgttttacttacaattatgtggttggttttagaataagtatcatgtggtgctgagaagaatgtatattcttttgatttgggggtggagagttctgtagatgtctattaggtccacttggtgcagagctgagttcaagtcctgaatattcttgttaaccttctgtctcattgatctgtctaatattgacagtggggtgttaaagtctcccactattattgtgtgggagtctaagtctctttgtaggtctgtgggttgaaaagactgggaaaagcatattatctgtgctggaatgcaccgttcctcatggcatgttctcttgttctcttatggcttctcttggctatgggaaagagttccctgaccccttgtgcttccaagtgaggcgatgccccaccctgctttggtctgccctccgtgggctgcacccactgtgtaaccaatcccagtgagatgagcccggtacctcagttggaaatgcagaaatcacctgcatgctgtattgatctcgctgggagctgcagaccagagctgttcctattcggccatcttgccaccttatcattgagttcactcgcatttttttcttaacctctctgaaagttgaaatttcagttagatatgcacagatgtcaatactgacccatggcggtcatttgtgatcctgaataaatgacttaaactctctctaagtctccgttttcttgtatataaaataaggacaataactctacctaccttatgatacagtagtgaggattgtattgtaacatgggcccaggcacactgtggatggttgatagatgttagagataatcatcaagaaatgctgtgtgactagagcaaatgtctgtaaatcatcagccagtgatggcacagaggatgctttcaacagataatagctaaaataatgatgatattaatgatgacatttgtgataataatgataaaaatgatagcgactttgacttatcataaggtagtatttgttaaatgactcaaaaagccagaactgactttagcagtgaatcctattctcattgccttatgttttaatttgcaatgtaaatgtttggtttgtatattttgcctagaagacaatatagttgaagatattccactgctttccttcttgttttaactaggaaagtgatctctttactctcatccaaacaagatatgttttccgtcacttttaagtctattcttatgaaatctctgtctaaattctgttcattgagtcatctgaagactctcttttccattttgttacagaaccataattatcatgtgatctagacctgatacattgtagatgaagaaacatgtcgacagagccactatctgcccaacatctgatgggtagtcatagtcacagtggaactgagactaaggtttccatttttatttgactatgcttcttcccaaggtaaatacaggatttgagatccatattttctacttgcatgactgtgttgaggtttttccttttcaaacaggagacttcattttttttttgtttcacgtgtagggattcatttatagatattttttctttcaagtggtccagtctaacaataagatcacaaactcctttttgatggtgaccatttctcagatttctttttctaatctctagcatagagttttatactgatatgctactcagtgatttgctggttgaattaatttttaattaaatgaaaagaatgtcacacagctctaacagtgacactatttttgctcaattattttttttttaaatttgttatctatttcttgtgaaagactatgtctctgaatatttgctgacaaagtggctgaattttatctgggaaatttccagtaagaatcactgatgtcctgaatagtatctcaggtgtagactggcagataggctcaaatttcttcaagtttattattagttctatagtgctgcttcaacacctccaaatagcatatgatcaactgtatctccttttgaatatacactttaagaacattatcaaacaacagaaaattaatgcttctgggccattggacaatgttcatagcttacaacgttatgtcaggaaattttaatctaagtgtgggttacatctctcattgcaatcagaatgttcaatatctattgagtgactgtcatctactaagggttgtgctaggcactgtcacatacattatctaatttgtttctcatgaaaagtctgtgaagtgaatattattatccctattatgacagtgcctaaattgggaaatgaagaggccatgcgatctgctcaggtcacacagactggcctatacatatttctaataagctttgaaagtatttatgcattatctcaaaaatgttttaattatcttgcactcatataaagcatatgttgaatttaactactattatcattgcactattttcatgaatttggacaattttcaagatcagatttttattttcctgtttccttgtcaaatgtagcattgcaatataggtgaaatagcatgtttaggatactctaagaaaatattttttgttaatgatttgaaaatccagcagatttttagaccagacataagctacacatataaatttatgctgataagtatttggcttaaaaatgtaagactaaatacaccaaattcatattattaattctgattattactcttttaagtgtttgtatacgatcatcatgtattactattacttgtactattgtttgataagacagacccagaattcaccaattagttagatgattgaaaaagtcttctcatataaatgtttaaaaataagctctttaatattagaaatttttagcaagtagtgatggcagacttgtttataaaaaattattaaacttttattttaatttaattacacaatgtttggctcatattttgcttcttagcctacctcagtgactgccttttgagcaccatgctgacaaattacggtcagaggtgagaatagccccattaaaggttgcaggaattgccgcagagtgggaagttgaatttccagaccaaactcaaatgtagtccatggtatcttcatgcttttttcatgcttctaggataagggaaattggaaatgctacagatgtgtatggattgaagtgtgagtaaacctgaggatgtctggcaagaataactttctttatctcacacaccagcttctgctgggatctaagaaaagggcgttttctattagcatcattgttcaaaagacacatacactaattagattttttaagctgctgctacctgaggaggcttaatcttctttgatattattttacaatagactttccctccccccgttatcatttgtgaactacattcagactttcaaaaaaaaaatgctattaggatactgaaaagttgtgtggaactgtttttattgtggcagatattttgtatttggaatcaaagtacgtttaaccacaaagggacataattttgctagttgtgggaggttcccattccaaaacaaaagcaaaagcaaacccgtacttttataagcttaataacagttggttcaaagtaccgttgaattctaatagtagtgctctgtccactaggaagaactttcaggagaccaatttatctacttttgtttgatgtgaacacaattgttttctgaatgtaaaattgactcctgagcaagaaaaaaattaaaagtgattgcaacatgatgctatacatttgtcaaaacccatagaaatgcacaacgcaaagaatgaaccctaatgtaaaccatggattttagttaataatgtatcattattggttcatcagttgtaacaaatgtatcacatgagtgcaagatattaataataggggaaactatggggagggagtagggtatatgggaattctctacacttttctgctcaatttttctgtaaacttgaagctgccctacaaataaagtctattagttaaaaagaaaagtaagtggaaggtagaccccttttcttacatgaagtttaaaggtcagaaagtttacccttattgggaactgttagtgttttaaattcgcagcattgccaatcactatgactatggtaagctgtgggctctgtgtttcccattccaacagcatgataaaagatattaattaaaaactgcatttgagaagtaatattgagaaattttaatagttttcttttcctcagggcttctcagcacctttaatttattaatgtaatatagaaaacaccctgtcacatggcaagagtaatgccatcttgaagcagaaccaagatgggtttggctactggatagtagccaatgatgactgatgtttggcgactggattctgtgttcctgcagcaaggtcaagaaacaatgcctatagcatagaaaaatccctcataaaaatgtttatctaacttccccagtggtcacaagttttgcaagacagtctgacacaggactagctgcacatgtttcaccaaaaaaaacaaaacaaaacaaaaaaaaaaacaaatgcttgctacataagaatactttctcaagtgagggtacagggattaaatgtttctttctgagaaactggatgtggtagcctctttctttggcctctcagcttccttggcctttgagggtaggtttgcatagacctgctcactgtagtacgtgtaataaaacatggctttccaaagggcagctattatatgcagcatttctgaaacttttgaactgtggaatagtttttgcaaaaagccactgttccccaagtagaatacacttggggaaatcttatattctaatagtatcatgaaagatacatgactgactctgagggaaggcattctgtgaaatcatagtgaacatggtactcaaagagtaaatgtggaccctccaccatcccctcatattgtatcagtcagcatgttctattgattcagttccataattttgctaattttgcttgctttttatcaaaccctttccatccccttgctaccatcctaattcatgacataataatctaactgttgaaagtatagctaggtgacacttctttaatgacatcactcttttaaggaactcatgacttctttcttttgcaactcgttctttcacagttgctatctctcaacttccatctgagggttcaagtctattctagattataggataggatggccagcttctccagtttgcctgggattgagagatttcctatgatgtaggactttaagtgttagaacatgagaaatgcctgctagaacctgagaagtacctggcaaatggagaccaattggtcaccctactccaggacctcttttgacaagagaccttagggcattagttggtttcactgctacccccttaattcacttgagaattggattcagaaagtgttcttcagcaccttcatttccttctgcatccgagtcctagcactgaattagtccctgcagctgaacccagaaatctccttactgccacgcttttctgaaaacctgttttttaagagtctgaattctcatctgttgattgctatgtaaatctccatcaattgtctgcctcactctgagggttaggtctcttaacatcctggtgactctggcctttcctattgctgtggctgcttgggtctgaaaaatcaagattcagggtatgggactagatattcaggtttaggaaccctaacttattggctcattcagcaattttcctctttcccaagaggaaatttagttaaacattttttatggcagtttaatttacatagagtgaaatgcacagatcttaagaattacactttgaggagttttgacgaatgcatatacccatataactcacatctctatcaagatgtaggaccttctcatcactatagaaatttccctcttgctatcaacatggtccttgactgtttgcctcctcctatcacagacaaacacagctctgattcctatctccatagaatagttttgtctgttctgaaacttcatgtaaacatatatatatagtatatactcttttttgtcttatttctcactcagcatgtttcgagattcatctgtattgttgcatgtttcagtagtttattctgaaaatgtaatgttctaaagtttgtatttataaggtaaggaagatctccttgattggagagcaagagatattcctaaacatctttagtcctatctcagactacacacatgccattaaataaatagatttgcatataaaagatactaaatacatttccatgcttttgaaaataagaacttacattgacttatttaagactcttccttcaaaaactcttatgattgatagaactgataagattcaaaattcaagtcagacttctatattacatacagttttatttgaaagcactttgaaaaagagtttgaagcagttaaagtgtttttagacctaaatacaaagttcaaatatgtgatattgtaacagaggttacctgctttaatattgtatatatcacaacataacactccataataatatttgaaataaaaagttttgataactgtaaaaaagaattgtaaactgcagataattataattaaccataaatgttaactgatcacctaccatgtataagatgatatgctatacatggaaaaggaactttcaggggagataatgagaaatagaggattaagtcataatcaagtacaaggtgagaatttttttttttttttttttttttttttttttttttttgagacagagtctcaccctgttgcccaggctggagcgcaatggtgcagtctcggttcactgcaacctccacctcccgggttcaagcgattctcctgcctcagcctcccaggtagctgggactataggcaagtgccaccacacccagctaatttttgtatttttagtagagacggggttttgccatgttggccaggctggtctcaaactccttacctcaagtgatccacctgcctgggcctcccagagtgttgggattacctggccaaggtgagatgttacatattcacaaagttacagtaatacaaaatacaatacggtaagtgccaaatgaaagtaagtagatacttttatgggagtttatatggtgagtatgaatacatataaacagtgcctgacaaacataataatcccaatatgtatctgttcttttttctttctcctttcattgaaaacatttatttggtggggagggctctcaaactggagtgcagtggtgtgatcttggctcatggcaacctctgccttctgggttcaagcaatccttctacctcagcctcccaattagctgggattataagcatgtgccatcacactggactaatttttgtatttttagtagagacagggtttcaccatgttggacagctggtctggaaatcctgacctcgagtgatccacccgcctcagcctcccaaagtgctgggattacaggtgtgagacaccacacctgaccaagagttttggttttatccaaccgggaatgggaaatatttaggtactgatgtttttaaactaacttgtattgcataatcaaattttagaaaagtaattttcctgaagtgtatagaatagacttaaaagattttttaaataacataaatataattgaaatgagtatgtaagatccacaccaaaatatatgtggaaggttggaatctatcactctttgtaactaataccaagaatcaacatctttggaaaatacttcaaaagagtttcaatggacctggagcagtggctcatgcctgtaatctcagcacgttgggaggtcaaggtgggtggatcacttgagctcaggagtttgagactagcctgggcaacatggtgaaaccctgtctctaccaaaaacacaaaaaatttagctgggcatggtgacgcgcacctatggtcccaggtactcaggaggctaaggtaggagaatctcttgagcctgggaggttgaggctacagtgagctgagattgcaccactgcactccagcctgggtggtagagtgagaccctgtctcaaaaacaaaacaaaacaaatcaacaacaacaacaacaacaacaacaataaagagtttcaagcctggtgtggtggctcatacctgtctgtaatcccagaactttgggaggccaaggcaagaggatcacatgagttcaggaattcgagatcagcctatgcaacagacttagacctcatctctgctaaaaataaaaaattagccaggtggagtggcaggcacctgtagtctcagctactcaggaggctgagctgggaggaccccttgaggccaggaggtcaaaggtgcagtgagctgtgattgcaccactgcactcccacctgggcaacagagtgagaccctgtctcaaaaaaaaagagttttatttaaccaaaattttagttaactaaaattttagtaaaacaagaggaataaattttcagatctgttgtacagcagagtgactatagtcaacaataatgtactgtatatcttagaacaactaagagagtaaatttcaaatgtctcactacaaaaatgatgtgaggtctcagttatgttaatttgatttaattactccacattgtatacatatatcaaaatatcacaatattctccataaatatgtacaattataactgccaataaaaataacattaataaaaataaattttcaaaaagcttaaaaaggaaactaacacctaacggatgaaaatgattggtattaacctgtttctggttgccattctttttaattgctgagtaatattctattaggcaaatgcagttgtccctcagtactctcagggggattggttccaggaacaacctctccataccaaaagcagtggatgctcaagtcccttatataaaatggcatagtgttccatcctcctattattttaaatcatctataaattatttataataactagtacaaagtaaatgctatgtaagcagttgttatagtgtacttctatttgtatttatttatctctgtgtgttatcttttattctttttcccctaatatttttgatcttcagtttttgaatctacagatgtggaacccatgaacatggagggctgactgtatatcataattatctgctgtctagttgatatatttggagttgttcctgcttttgcttattataagcaaagctagcataaacatttatgtccaacttttttttggtagacgtaggtttccattgtcttgggtgaatccttataaataggagtgttgagccatactttgggtgtaggtttataattataaaaactaccaaaatttcccaaggtagttttaacattttgtactcctaccaatatatgtaggagagttctggttttccatgtccttgtcaatatgtgatgatgttagtctttttaattttagtcacttttgtgggcatgaaatggtatctcactttggttttaatttgtatatttctgctgactaatgatatataatactttttcatatgcttattggccatttataaattttcctttgtcaaatgcctgtcagagtcttttgcccattaaacaaaattgtttgttcatgtttattattgaattgtaggacatgttttctataatctaggatttgtgtgtatcagaatattttcagctatcaagagtattcagatatatgtatcatctagactctggcttgcctattcattttcttaatggtgacttaggataagtggaagcttttaattttgatgaagtctcttttttttttttatggtaagtgctttctgtatcctaagaaatctttgcctactgcaaggtcagaaagccatctttaaaaaaagttatattatattttaatagtgttatatattttagcttttatgttgaggtgtacaattcatcttgaataaatatttgtgttcacaatgtaaggtaagagatggcgttccttttttcctcattcatgttacgttactggacattcacttttaaaaaattgttttattttatttgtaattgacaataattgtatatatttatggggtataatgtgatgttttgatacatgtatacattgtagaatgatcaaatcaggctcattatctgtcacctcaaatatttatcatttctttgtagtaagaacttttgaaatcctctcttttagctattttgaaataggcaacattattattaactatagtcactgtgctgtgcaatagtacaccagagcttatttctcctttctaactgaaactttgtacctattaaccaatgtcccccctttccctgtccacctttccgtcctccagccactggtaaccaccattctactttctagttttacaagtttgtcctttttaaaatttcacatataagtgagattatatggtatttgtctcactgtgcctggcttatttcacttagcataatgtcctctaggttcatctatgttgttgcaaatgacagaatttcctgttcttataagtctgaatagtattccagcatgtgtgtgtgtgtgtgtatgtgtgtttgtgtgtggtatgcataatatatatacattcatctgttgatggacacttaagttgtttccatggctattagaatagtgctgcaataaatatgggaatgcagacatctcttcgacaaactgatttaatttccatgggattggggaactgacttttgatgtccaaacttagtatataatacctcaaaagccagaatgccaattattttgtgttataaagttgtttggctatcaatccatatttttgcatgaggtagttatcttgcaggtaggcccattgagaagactagaagatagtcttgattgattcttgttgaaattgaaattagagtaaagggacatccaaacacttatccaatgaactacaatgacatacaactcactcaagccttcctttttctaaattttctccccaaataaaacaacagcagcaacaacaaagacaacaaaaacgtatgcgtttcttacagctttatgatgtgtttcagtgtctacagtactgctgagtttgcatctcttgcatgttgtatctttctggtaacatatggaagaagcttcatattcatataagtatgctagttctaaaacataatgtggaatcatttacaactcagcactacttggtagcaataaacagaaacccacctcaaaagagtgtaagcaaaaaaggaattgaattagattacgtaatttgagaagtccaaaggctggagttggtttaagcgaaatttgtattgaaaatttttcttacataaaaaaggtaaaacaaatttggtaaacctaatttttttttatagtgcaagtagtcaactgttgtcattctaagaaactattatttatggatagtaaaactgtttggagactttaaaaataccctataacagttaaaggcagagcaaattactgaaataaaattgcgatatttgccccaaatagtaacagtacaattttcatcagttctctagaaaattatctgcaattaaaaaaaaaagaattctgatgtgttaactcaaattaatcagtattttctttgtacactcagattgcaacctaagtattagtctgttgaatttggtttagtggatatttattcaggatttttacaaaaacaaggaaacagagaagaggaatagtgctgtgcagatgacctcggggttcaggcgacactcaaatgcctgcttctcctctgaggttattaccatctcttacttgtttgacgtttagagatactacaagagatagttgaaaagcagaggttgcatttccagtggtgttttgctctgctggtatttgctcctccgtgctgctgtgcaaagggccagaactgcatcgaatggatcttttcttcaggttgtgcaggctggctgccttgatgtcgtagttgctgatgttggctgccgacgaaccttattcctttacatttgcctggtcctcatttcaccggaaaacacagtagctgtagctgcacatagacgcttcctctttctgtttccccctcatccccctccctagacctctctgggctttgacgtcatgtgtgctcctttcggttgccatagcaaccccattccccaagccctctgtccgtctcctctggtaggttccacaatggtacaggcagcatcacgctgcacaatggtttccaggcagtgaaagagggtgattcagcaagccactcttcttctattttctttaacctccccttcactttttatttttatgggggtgggtggtgcttgctatatgcttacctttttcttttcttttttcatttttacaaatttccttttttgtcctcacccctcaattcctaggggcttgagtgagtttaagattgggttttcttggaaatcacctgtccatcgttaattttaaacaatctccatatctccaaagaatctcttccatgttagtctggaatgtggttaatgaaaaacaagtagggaggatttctggggcaaacactgccggatcaggatcgtagttctcaggcacggaatggtaggtggctctttgctcgttctgggttctaacctgtttttggagggtggggtgatgtctattgattgctcctggtggggcgggagagggagtatggaagagacgagagaggtggggtggaaagcaggttaatcaagtgaactagctttgaagcaagaagctaccagtttttccctctgtgcagaacatctctttccagacttgggcgtgttgaaacctttccatttggagtgaggggtagcagagggagggagggagcattcttattgtgaccaggggtttttagaccaatgcagggctacagaagggaagggagagagagagaaacacacacacacacacacacacacacacacacacacacacacagagagagagagagagagagagagaggaaaaaaaaaacaccaaacagctgtgcttgttagaagtgctgaccttagttccatatctgaaaaatgtgatgggttccataaaacattaaaaataatgtcttttagtatgtatttatgtttacttttgtgagaagtataatttaaatattttaagatgtattttactaaggaacagtatttatatatatattagatataaaactattggcgttactcttgcagagcaactctaggctaaatctgagccggggagaggaacacagaacaggggtcaggttagagataagaggaaacattggcactgcagtcaaataggtaaggggtccctttaagaaagtgatctcctagtcacagcagtcagctttctttttttcatggcaagattcccaggtattctgtgctgggatactgtgtcccctgcaaatgtcagagctcttttgaaaaaaaaatcagaaataagtatggcagtatatttgttagaatctatgtatttgtgccttcaacaaaataaatgtaatttactggaaaatctgtaagtaaatcaggctatagatattacaagaaaactatctatccatatatttttctcaccctccccaaacatttaaatctagagacctagtctctgcttttacccccttaaacagataacttcccagggtactgcaatttagccacagaaaaagaatggcttatgccacagcagtaggctctgaagcaatcacaaggttgtttacatgggctgcctttggtgcagagcctgacagtgtctgtacagcagccctgcctgcttctggccatgttgatgataacttttatgaacaaactgcaaggaagcaggctaagtcatatgggatagactacagttcaggtggaaggaaaacgagtgtaagtgcaccaggcattgccagcacaacatccaatatctccttctatccctcatcggctagttgtcggaccctggaagataacacagaatgcttatcaacatatttaaaatagttgcagtaaggaccatttctctcagagaagcttctgtgaattttctactttaggtgagcatatatgttacaaatatataacaaataaatatataagtatatcacaagcttctgactccacttcagaaccattagattttaggggctggatgctttggatgtagcggtttggctgcctctggtatgtatttccttctctaccttgatcacactcttaaaattgacataaagtattggattagcttattttcttatgtggagcaaactgggttttctctcccctacaatgggactagaaaatcagatgacaaaggtggtgtgaccttaaatattagagagtcttcatgcttcctcatttgcctgtcattcctctgctgttgcaaagtgtctttaatttgaggggctcctgttcttaaaaaatcctcacagtttcagtaaaacgattctggatagtgaggcagtaagaaattatatgtagagtgggaaaatcagctgcctccagcttcctgcctgctagccccagaacagcatctgctgttgagaggagtgtgtttgccatgctggaaggggatgtttatgaacagatcccagaggggctgagtgtgtttttgctgtcattgtctggtatgtctgcagctattagtatttaatggtttcatagtacatggtctatatattctaaggttagaatgaactgataatttattgtcaatgctataaaatgtagatattttaaatttataggaaaattaataagattttccttgttaggatatcctacaggaacatcataagcaaaacaaatttgcccaacctaagtaatctagaaaaacctcccatgtttaaaggcataaatatatttttaaggttttattgtggtttcatgtaaatgaatctgtttctttggatgtaagcctagttataaattctttttatactgatactaaaagctaaagacaaattgggtatttacttgtttgttaaatatggggatagatgttctcccttcatgctctagttctggcctcaggtcacatttgtagccaaaggactttcagtggaattggtgtgttcaaatcgaatgattgcttggttgcttatcagaataaaggactcaaagcaagagagacttccttcaattagaatgagaagcaaacacattgttgtcttaaattctttcttcattgccctttctatttcctcttacagtctcttttaagcttttggttggacattgcaacaatcatgcagaaagaggcacggaagtgtccagtagtgacaagaatggagtacaatgctctatttgctgcaggactgctgagtgccttcctcctaccacacatgcatctattattgcaccttcttctgaggaccaaggacttgtggaaaaagttgggcctatagactagtaggggagatgcttactggtaaagaagaacagaatccatttgcttctttggcatattggatatatttattgcattacataagcctgagatgagacactgtactgctgattcagataaaaagatcatgctgcatattgattgtttaaaaaatgtaacttagaattggagcccatcttttcagaaacctgtacgtgtttgcagagtgaagttgtaaggttttgactcaagatttttcagtttgagtacattttatcctcatgaaccgatcaaggcaaagaaggggaaaatacaaaacctgtgttttgcatatcttttgttttctgtatttaatagggagaagctgtatttcttattgtgaatcttggtagaaactcttaagaggagacatcaggtaatattgaaaatcactaaatataaacattttaggtttaaaaagtagacctcacacatatactatttctggtaaaggattttctagtttatttgatgttttggatccatatcaagccactatggcttttcttacagttcttatctctggtgactatgagatgtaaaatccttgaggcttatggaaataatgctagtaggaatggaaattgaagttttcaatggaaaaagaaatgaatacagtctcctgagaagcatccctaaccacagctgctctaaaaccctgcatggtgtgcaggtttaaggcaaagcttccctataaggcaattgggcatttgcagtgacctgcacagtaataaacaggattttcactaccttgtgtttgtacacgtgtgtgtgtgtgtgtgtgtgtgtgtgtgaagaaaaacaaaaacaaaaacagcagtgactttaaagttctagaaattcatcttagtgacttgtcttcatagaaataaaactgactcctgtttgtctgtgttaacctgcctgggtgccctatgtgctttctgaaaatggattgcttaaagcaattgtcctcttcttatacattggaaataggatctgaaagcattgatagtgaaggaaagctcttaggttaggtctgtttatttggcaatgtttattcagtgtttgtaggcggaagctccagcacagcatttatataatatagtaattgcctattcttctattacctgtattctctactaaggtttaatccccatcagggactgactttttctgtttggcacacaatagggacacaccaaatattcattgaatgaatatctctcatgtactgagttctctgctaagtgctatggtagaaaaaattgggaaactgtaacacagtttctgccatttggaacctatactcatttgggaagatgaggctaaataacaataaagatggtataaaatcaagggcccatattagtgttttgataatgagtgcaatagaaattcagaggagaaaggaatttacctcctctgaagtgatggtaggtgacaatggggctacactggggtgttggggtgaggtggtgggatagtgagagggtggtagtcctaggagtaattgtgagcacctgggcaggaaagaaactcttacttggggtaaagaggaggcctattttgggtatgatgaccatattttccaaactagaaataaaaacttatggtttgacattgggtagaatgttgcagactgccacatattctgaagaatcttgtctaatataatgttgggaagtaacaggctataatggtgaaaaagtaggttagtaactagaagaacataaatacaggtctcttcagatgagctccagcttaggtttactttcttttgcatacttcagaggttttcaaaattctcctcctttattggtacctatgtaaccattgttccaatgaaatcttgtatgaaaagcagaatatgtaaatctatgtaatagtggagctgtcccagttgaggatgagtggggtgccttgtattagaaaaccaaattcatatcacaagactaattatattaactgaaataagaattactaatttagtttatgctcagatattaaaatagttgttctggtattataacatcaaagttcttgtgcttgcaataaatgatgaatagagataattaccttgagatattttctttcctctgcctacactcacccacccagtaaccaactgtctttgatgtcagctttttggttttctaaatacaaatttaaatcttaaaatcaaactcatctgttttttggctttgctttcaggctagtgtgagaaacaccaacagcaggcccatctcagatcttcactatggcaacttatgcaagaaactgttgaattagacccgtttcctatagatgagaaaccatacaagctgtggtgagttgccaatttaaaaatattccttagcatgaaaactaggatctatatagccaatttaaatattgcatatggttttgtacatggagctggagaaatactgctccaaataatttcgactacagaagtgaaaatcaatagaacagaagtttaatagttggtgtggtactactaataccacatacagtagtgaaaagtcttgaggtgcatgggtgcagcatataacaccatgatactaccaccatggatgatacctgcaattaacattttcatgtggcagagtaacagttgggtaccattatttttaagtgacttttattatttgcaacattgtactatattttacagattcatctcctttagtagaaaaattggttctgagctaaattatggttttctttcaggaacacacacacacacacacacaatttagctcttctgaaataagagaagagaaatcacagttttataaaactcaattcatgggcattttagcctacaaatccttttgcttaacaaagcaatgttaaaaatagatacagttgctctgcctagttggaatgactttaaaacttattactttataaaaatatcagcacacacaggtagaatgtctttttaaatcaaatacttgatgcttcatagtcaccaaagtcaataatcaatagattccagcagagatgaacgagttataatctgtcaaataacatctttgagaactagagtatgactgtggtgcttataagactccaaaagaagctattttgagctagtgatcaatatctttctttcatttgcctagtggcttatataactgtagataggtaggctgccctgtgaattaatgcacagcctatgactgcggaagactgatgaaattaatcctagagttatttcatatagtgaatttataaaacaattcataaaaaacaatccatctaccattatattgagaaagcagatctaatagcatcactatactgtgcttaattaacatgtattcaatgagcgttataaataattttatgcaattgccaataacaaactatttttgacctaaaataagggcaattttatatggttgaaactaatatattatgtgttactcccagtgatgtagaaagcataccatgttctctccattctgaatattaattcattaatcaaactcttattgagaatctgtgatgtaggtagaatgtttagcttttggggcagataaaagacagtccttgctttaaaggagccctcagtctaaagagtggggtacttacaataaaatgtgcttattaatggaggtagttgtgttctaaagagtgtggcacttacaaagtgctattacatgggtaggtctagagtgccaaaggaagtgcatcagaggagactctaccacggatgtggtagagattagtcaaggaagacttcccagaggaagggatcttttggtggactattaagcacagtgaaaggatagccagaggaagggaggatgcagtgcacagtgggaacattttttaacagacccagaagcctgagagagcatgattgtgtgggaatactaggtatcatttactatgctgaagcagaaatggtagtggcagagataaagttgaagagggatacaagacatgtgccatgaaggatctcttagacaaaattaaggagtttggattttgtttcaaagtgaagagcttttgaaagattttaaataggagattgacataatcagtttattttttaattgtgaaatataccatacgcatagaagagtgtataaaacaaatactggttaaagaataattataaatcaaacatcatgtaaacaaatcaaacaacataaaacaaatcaagtaaatcaaacatgatgtaatagactcccagcaaacccctatgtgtccctttcagatcacatacttttccttccccaccataggtaaccgctagctactatcccaccttttgtcatgcacattaccttgcttttctttgtaggttttccatctatctgtgcatctctaggctatgaatcttagttctgcctatgcttcagctccatgtatttggagttacagcatgtatactctcaatcacctgattattctgctaacattgtgagattctttcatgttcatgcatgtagtttattcatgtaaattgttgtatagtattctattgtatcaatatgccaatatttacttatctagtctattgttgttgaacatttggattaaatctattttacttaatgctagtataaatataaatataatatcatttttatgtttatatatattagttctcatagtttctgatatttaccgttttctaggataaatagcaagggaaggaactgctgagttttggggtatgtgcgcctttaattttactaaataattccaaaatattttccccaatcagttgcatcaatttacattcccagcagcagtatatgagaaactctgcattctcaccaacacttgatttacaagttcttaaattttgctaatcaggtagatacataattgtactcataaaagtattaatttgcattttgctgattactaatgaagaagagcatctttccattttttgttttttggtaatttgattttcgtcttttgtgaagtacctgctcaaatctttttgagatgtgtctttcaaaatgataactaacacttattgagttctcactgtgtaataggcactatagtaagtactttacaaatagttcatcttcctagtatccctgtaatttagaggtaaggaaaccaaggtttagagaggttaaatcagttgctgacaatcacatagttaaggaacagtggacttagcattcaagcccaagtctttctgactccagaattcttcagtttctcggtgtttggaaggggatttggttggaaccagggagaacatctaaggtgctattgcaggaatccagttaaaaaaataagtgcataaaccaaagaattgctagtagggcatatgtaacaaacaactggacttggtaatgaatgtggtgggcaaacaagaggaaggatttttaaagtctcaagttttaatacctgtcggctaggtagattcaatatttgtcataaaatgtgtgtgtgtgtgtgtgtgtgtgtgtgtgtgtttgtgtatacacactgtatatatatatacacacacacattgtatgactaatgttgtaatatattgtcatcctttgtacatatattgtacaatacattgtcatatatatattgcgtgtgtgtgtgtgtatatatatatatataaaatacagatattgtggtaggtactaataattcattttataaagtccaggtattgtaggtactaagagtacattttgtgaatctacaattcaatgagatgaatttagttcacaggctcataaattttagggtttaaagcaatgacactgttcatttgggtcaaatcttcacttttttttaaagatatggaagcaactgctaaggagggtaagtggcttgtccaagatcacatgtttctaagtgtcaggttaagaatagatacgatgcctgcaaaaaaatgcaaagaaataacaaccacctgatttttaaattaacgagtgatgacacaatcaacctattctatttcctaaccatttctcagacaagtcctttttcatctaaatctgttgttactgccataatttaggtcctcatcatcatctttggcaggtttatttaagtagcctagcatactatcttcttgtccattattctaccagtgaagccaccagacttgttatttgatttgcagttgttaccgtataattgccctacttaaagaattttcaatatactctgtcatccatgtaataacttcccttttccttaagacatgccatacttctggccaggtgggtggctcaagcctttgtaatcccagcactttgggaggtcaaggctggtggatcagctgaggtcaggagtttgagaccagcctggccaacatggtgaaaccctgtctctactaaaaatacaaaaattggccagacgtggtggctcacgcctgtaatcccagcactttgggaggccgaggtgggcggatcacgaggtcaggagatcaagaccatcctggctaacacggtgaaaccccatctctactaaaaatagaaaaaattagctgggcatggtggcgggttcctgtagtcccagctacttgagaggctgaggcaggagaatcacttgaacctgggaggcagaggttgcagtgagccgcgatcgtgccactgcactccagcctgggcgacagagtgagactccgtctcaaaaaaaaaaaaaattatctggacatggtggtgggcacctgtaatcctagctactcaggaggctgaggcaggagaatcgcttgaacctgggaggcagaggttgcattgaatcgagattgcaccactgtactccaacctgggcgacagagcaagactgtctcgcacacacacaaaacaaaaaatgatatgtcatactcccatccatccccattttagatactcttgaccttttaaattgcctggaaacaccagtgtgcttcagtctcatcacatctactcaggtgtttcctacctctgtgatttacttcatgctgtttatactgcctgtattcactctgcacagcccttacttactcctttccatcctttaagacgtttgtgactctatgatggtctgggggctagcagcatggacatctcctggagcctgatagaaatgcagcatctgaggtcctactactcagacagacacactgattaagaatctgcattttcacaagattcctaggggatttaaatacatgttaaagtttgagagtactgtttagaatcactttagatttcataagattctatctcctcctggaaacctctcagatccctttcatccagcattcaatcattcttggtgttctcacagtaacctgtgcattatctacctcactgtattaccatagtatcttattatctgtttattatctgtttgtgtctgctttgcctcccaccttagccagggggtattttgagcaagactcatctttgaatttcttatacctcatacagcgcctgacacttgataggcactgcataaatatttattgaatgattgacaaaagaaagaagaatgagaaagagattgatatacagaaagaagcagaagcaggacaaagacagacacatgaagaaaaaaacacatagctaaagagacttccatagagacaaaagcagtttacacaaaggcatcacaaattctgtctctggatacaatgtggaaggcagcctggcagagagtccataatcttatttaaataggttaggtaatagcctatgttgtttgccaatctctcagaagaaaaatttaacttaattgctcatttaacagcattgttttttgatgattgttattaagtaaatttttccaaaatttgccttactttcctaaacaaactgttgttctgtcatttttactattcagaacctgttgggaatattatgtgtagcttttagtgccctctattaggaatgactttcataaaatgaaatgagtcctgaagattttgttgaggatggtgaagatatagaaaacatatcttgtggtggacagtcaagaaaaattatagtgttttgcccggagaagagaaatgaagaggaaagatcgaggtggagggtggcagcgctagagagtgaaagagagtgcaacttaccaagcaactgccttcaatatttaacggctttcatatgaaagaggctagaggatgcaggattgtttgtaagttgtactgaaggcagaactaagagaccaaagagtagatagtaggtactgcacataaattttttttttattataagaactgtttgagcctgtgctttttgaaaagtagtaaagttttcatcactgaaagtatttaaccatcttcatggttgaccaagtatgaagagctttttagagatgatactactttgtgtgggagattgaactaaatgactgtaggatctaaggtccctattacttatgaatctatagttattcagagaagtacaggaagaatgggggttataataaagaactacaatagtggctaacatttatagagtgcctacttcatgccaagcactgttcatagtgctttgcatgtcctagttcacttgagcctgacagcaatactactgaacattcctattttataaaaggtgaagacaaggcacagatgatttagtaatgtgccaccggtcatgcagctagtggtgcatgattctgactctggagcatatgcttattactgtgctgtcttctttgtagtgttaaagatgaatattggacctaaatagagccttaaaatattgatatggtttgaattccaggtaagtatatggataagaattccaaggaatagtaacagtaacaatcaaagtgaagagaaatagaaattagcataacagatttgtggaatcaaataccttacaaatgagatgaataagagaatattcagaaatgtttaattctgtggtgctgttctgtcttgcttctcaatggctgcagcagttaccaagatgggaaattaaatctttaggagtatttaacctggtaaaaccgatataagtagccccagactatgttctgaattttgtgttccctccaaattcttatgttgaagtcctaaccccaaggagatggtattaggagatggggcctttgagaggtgattaggtcatgaaaacagaggtgattgggattagtgtccttatgaaagagaccccagagagctagctagtattttccaccatgtaaggatacagcaagaatgcactgtctatgacccagaaagcgaaacctcaacagacaccggatctatttgtatcttggacttaccagcctccagaactgagaaataaatttctgttgtttataagctgccaagtttatggcattttgttatagcagcctgaatggactaagacactctagtattgtataaaatttttacaaacttttttcctccactgattggtagaacatgtagctatgtgtcttaggaagatggggctgtcactgtttgagagttcccaagtaatttgatgccagatcaggagcacaaattcaatgctttctcttagaaattgggattttcctggagtttatttgaagactgagtaagcatctgcaaaaattttaggttcttcataaagaattctctgtgttttgataaccagtatcagaggaactagtattaaaatcaaagtatgagattttaatgaaaaattggttaacataacaaagctattcaggttaagacttgaaaaatttagtgtatagtttaacagcattcattttatgtgataatttattatttgcattgtagataccataaatttaaagttttctttctatttgtacttttggagggcccaggtggtttgttagtgctttaaatcctgagactgacttttaagctctttcaaatttgactggacaatcttgatagtactgctttcagaaagtcacttataaatcttaagaatgaatgcaattctactttggagtttagtctattaagatatatataaatcttaataaagatactcttttatattaagacatatgtgtgtgtgcacacacatgagtacatatataatattgtactcattccctgccaaaaagattgaataaaatatatttagcaaaaactacgtgaaaaagtgggtaggaaacaatttaagctatacagctgtgtttaaactgtgtgggtccacttagatgtgtttttttttttttttttttccaaacaaacttgggttaaaaatacagtattcctgggatgtgaaacctccagatacggagggctgacttttcctataaggctgattgttggacttgagtatgtgtggatttggttagagacctgaggtcccggatataccaaggaatgaccatatttcatcttttgtgagtttcagactaatatagttagccctttgtgtctgcagtttcacatccgcagatttaaccaaccatggtttgaaaatgtagttaggcctatgatggttatgtctgtactgaacacacacagacatttttctcttgttataaacaatacagtataataactatttacatagcatttaccttgtattaggtaccataggtaatgcagagttgacaaagtatatgggaggatgtgtgtaaattatatgcagatactaccattttatataacgggtttgaacatccttggattttggtatcctccggggttgtcctggaatcaatccagtgaagatagcttgtgacacctttatatcatgtcatatgtttgtttgactatcctactatcctgttgccaaccagggttcaggttaacaaagtgaagcatcacaggcaataagctctcattcattgcacttattgtagttttggtcctttgtatagatgtctgactctgtgttataatttaaggaaccaaaacacattctgttttcatctatctctgcttctgaatctgatatcatgtataaaatttccacttgttcttttagttgaagacttcaaccattgctattcaaacagaaatgttatgaggcaaattgattggcttgctaacctgataaactaacttgaattaaggtgtgaattggtcgtaatggattttggatcataggtactaaaaccacatttgaataaatatggtgcattaaaatagcaggacactgcaggaatatataggaaaagtttttatatggagagggaatcaagaattgtctagagcggggtgttttgttcaagatttttatatggagagggaatcaagaatggtctagagcagagtgtttgttcgagtttagaagatttattcatatagtttctggaaaaggaagagcccttgaagctagatttttatcccagctatgtcatgaattaatattcccttgggcaagtcttaatttctaaagtgactaagacaccaatagtttcaccgagtatattggaaaatctcagtacagtttagaaatcctgatttctaaaggtgaattttaaaagatttctctcataagtaatcaatgaacaaatatttgtgcacaccagttcttcaacagcaaagaataatttcaagataagacaaagctgagcttcaactgtatatgagagaattgtaatagatggtgtctaaatttctttaattgtaaaaattatgtggattaagttgcacacagattgaattaaagaatgagatgatacctaagcggtctcatccaagtggggtaccttggtgagggaagccttggctagtgaaggactccatgaggatgcaaagcagctacgaggggaagagggggctcagaaggctattagagagggacttgctaatgcacaattttgctttaactttccccgttttgttgtcttcagcttaattctgcccattcttatttactctgaatcaataaataagatattttagctataggaagtcacttctaattattaaagatgtgctaaacataaggaagatagtttatgcatagccagccaaactgactatatcaattttccaggtttgcatcattctttatcccaaaattatcctttgctattgaaagactagtgtgcacaagtatttgtttattaatttacttataagagaaatcttttaaaatttgcctttagaaataatgatttctaaactctactgggattttctaacatatcaggtgaaactattggtgccttggtcactttaggtatgatatcaacataaacacatttacatgaagttaacagacattttcaatgggcagattactgtggtagagtcttggaagattaaatatcacacagttccttcctccctcccctcatattccctgcttcccttccttcctccctccctcactccctcacttcttccctccctccctccctcccacgaatatttactgactgtttactctgtaccaggtgctgcagaaacaaagataaatttcactttgtttctaagcagctcactattaaagtagggggctttggaggtggggagagaaagaagaaaatcttgtgaataaatcccacacagtaggatagtttctttgatagaagttgagagcaggcatagtggctcacacttgtaatcccagctctttgggaggctgaggcaggatcgcttgagcccaggagtttgaggccagcctgggcaatatagcaagacactgactctacgaaaaaattagcagagtgtggtgacatgtgcctatagtcccagctactcgggaagctgaggggatagaattcctggagccctggaggttgaggctgcagtgactgtgataagcactccagcctgggtgacagagcaagaccctgtctctaaactcagcttctacccaggcattctcaaatgaggttctgcagagagacatgagcccactgccctcaggcagtaattctcaaatgttttagtctcatgatccctttatattcttgaaaggtaatgagaaacctaaagaatttttgttgtagccactggtatttaccattttataaattaaaatataaaattgtaaatatttatgtaatttatttaaaaatcaatgattgtaaacccattacatgttaacataaatagttatctttttatgaaaactacttttaagaaataaaaataatttagtgacaaagtggcattgttttacacttttgccaatctggttaatgactgctttaacagaaggcagctgaattctcctatctacctattgtttcaattttttgttatactatacatcaagtcacctttggaagactgccatatacctgtgagagtacgagagtgacaatgttgaaccatgtcttcatattatttggaattagttttgactaatttgggggccacatgaaaaggtcttggggacactcaggggtccgtgaactatactttgagaaccactcctaaaaagtatctgttgtatgtaatgaataaatgtctcttttatgcatctagcatggcactattatgtaacacccttgaaaaaatcgagaaaatagtgttttgctatttagataaggtaccataaatgaggaaggctgccagactataagcctcacaaaagcagggatgtttctcattttcacccattacctgtcacaaaatctgacatagaacctgactctgggaatctcagtgacagaacgttctaacaagagggatgtactttcataagtccctgtagtcctaggtagaatgtggtgagtgttacaaataagactaaacatggaggagctggaggaagcagtcctttacagatggtaggtcaggaggtcttcatgaggaagacagcactggggtggaaatgcgaacatattttgatagtgctggagttggaaaggtaatttctggaagagggaacagaatgatcaaggagcagagtgggtttggagttcagaagtttaggcttgcgtggcttatgcataggggacatggcatcagagacatggctaggaaaatagattggggccagactgagggaggccctgaatgatctgtgaaggaatttggggtctgtttctatagatgatgaagaacctctcctttttttctaaactggtttaagaaaatgattctggcagtaatgttggtttgaagaagagaggtaagagaggcaggatgagcagttaaaaggaaggagagagagggaatccagcttgaacaagaggcagtaaaaatctgagtaggagggtctcattgttaaagaaggccccaatgtctcagataatttggagtaagaagctgtaaatgagagagtttcactcaagggcaggaaaacactgggttctttatgatttcattctaggctcagctacagtcttgctaagcaattatgcacaggtcctttagctttggtttctccatatgtaaaatgtagaaatggattgcttgcctttttgtgtcacaggagtctgtgtaaggattaatgagctctgacaggaagacactttattaatctaagccatcaataataaaaatgagaatgtttgccaggttcttttgctcctatgttgaaggctgctatgtaaatatgaaatactgcctggaactattgtcattgttaataatagtaaagtgattaccacgaaacgcctacacagcaaacttgttctcagtcaattccaaaaaggcaagatgaagccaggcatggaagttcattccattttgtttattctaagtcttccttattgtaaactattttcctgcttagtagagaagtcattttaacagtatttgaatttcattgtatctcattatttttatcactctattctggtcacgtattccatcgctatcagggacatcattattctgacttttccctacgcaaatggagatgggacaacatttgatgtgtctagttacctgcatcagtgttcttgtcaattttggctgttttcttcagtttaacccatggctgtatagtctgttggtcaagtaggtaaactccagagttaaactgcctgggtgtaaatccaagttctattattttacatgagatcctggttaggtcacgtaacctcttacgcttcagtttcctcatctgtaaaatggtactaataatggtgctttcccataaggttattgtgaaggtaatgaaggtaaagctcatagcattaggtgctcagtagctgccggtgttttttttttttttcttttttggtcaatttttattaccattgtcatcatgtcttctcttttcctaatcggggtcctttaccatttcttgttaattaattatttgtcttctagtagttaatttgtgataacataattgatcatgacctttttattacctagagtaacattctaaaatatccacaaaaatcttaaattttattcattgctctttcatatattcctcttgtgcttttcctccagcaagtcaagtacttaattctgatataaatataagggatctaaaaagtttgtcctaaccattgacaagtattatttcctatgacacattgccgtcctcccacacaattgtcctgtaaagaaaattggcttgccattttcctttttggactcatgtatttattcttttctcaagatctatatcagtatgtttctgtttttgctattgatcatgtctcttaagacttctaaaaataccttcccatattgtctcagattcattgagatctgtttggaacatacaccaagcccttggtctagagtgcagaagctacagccaagtttgtgttatgctcagcaaaccaaagctcgtctttctaatttgcacaaagacttcaagagtatattgggctagtgtgtgatcctgtttcacaccttatcaattgttatccattagtattgttaagtcatgactgtaaattcctgcgggttttggctaagtatatcattggcagattctcctttgtgtcatagttacatagaatgaatactcagccaccatctctccctgtgttgtccataacttccttgggtcatgaaccaaatgaaatcaatggtcttgcttcatgtgaaaaattgatccatatttgctaatagagaattatattctattcaaattgtataggacattaaaaatgactattgaaaatgcctgctagtagaggtggaaaatgattgagtagtaaggcaaaacagaatatattagcatttaatcagttcttttatgattctagtattgagtctttctcttagtcacactggcttagaaactgtttagatgaacatagcagaagggagtttcctttttgaaaattgttatcctctatctggtattaggtcacagagatgaaaatttagcacctctgctttgtttactttttagtatggggtacacttaccttaaccatatactagatgtgtgatatggtttggctctgtgtccccacccaaatctcatgatgaattgtaatccccaagtgtcaggggagggacatggtgggagatgattagatcatgggggtggatttcccgcatcctgttcttatgataatgagtgagttcccatgagatctgatggtttaaaagtgtagcacttccctccttgccctctctctcctgcgttgccgtggtaaggtgaacttgcttccccttcaccttctgccatgactggaagtttcctgaggcctcccagccatgcttctgtgcagcctgatgaactgtgagtcaattaaacctcttttcttcataaattatctggtctttggtagttctttatagcagagtgaaaacgaactaatacaatatgtgatcttggccaagttatctaatgctggtccctcagttttctcctttgtatattgaaaacaataaaagcatccatcccataaggtggctgtgataattaattgaggaaagagttgtaaagttattagaactatgcctggcacagagcaaaactttagtatcttttagcaagtatcattacctacttgaaataatatagtagttaagagcttgattctggagtagattggtaggctttagttctaactctatcatttgttgcctaggtaatttgtggattcacatttctgagcctctgtttcatgtaaattggtacagtaagaatatctaccttccagggtttatatgagaaataaatgggaagcacttagcataattgctcattgaatattagctatcattttttataatccttatgacacatgacttatataataattataatagcaaatacttatggagaacttattttgggtcagcaatatcttaagtatgttatatacactatctcatttattcctcacaatatctccaaagagataggtgccattgttatccctactttacagatgagtaaattgaggcacagagaagttaagcaacatttccaaggtcctacagtgagagaatggtgaaacaaaatctgtgcatttatccattatgctctacaacaataaaggaaatagttgaatatatttggaaaagaaaattagactgttaggctaatgactgaggctctcactgtgtcctgacctttttcaaaccctgaatctattaatacggtcagataaatctggttcaaatgaagattagtaggtagcactaaagaagaaaagaaggtaaggcaacctcttaaacacctgaaacctcagtggtgtgtgtgaaaatgaagccttcagtcctttttccccaagaaaagctcgttttatcttgaggatgaggtgggagcatggtttacttgaatatttccagtcttatttagcctcagcctcttcttcccttagtcactgcatgcctcccttagtcactgcatgactctgcctgaggccccaggaagttgtacatatttgctttagaccctgaatgtccctggtgatatttgggatgacctcttgttgtactgcagccctgccgatacactgtgtgtaatagaatagtgcctgactgcagagtgtgattcctaagggcttctgctttcaagtcaaacagagcagattcagattctcaatctgcttatatgggcaaattagttagcatttttaagacttgggttttttttttaatctacaaaatgggtatgtagcacatacctgagtctttgagagaattgaatgtaaaacgttttaatactgtgtcaggtagggaattttgtcaacactaggcactaaattttgttaacactaaacactaaaaactttgaaaaagattggtttgctttggatcattaccaagcactttcatcactgaaataacaaaataaactcagttgttatcatgacaaatgccctgggagtacttttcagtataataaactaattttatttcttcattaacatgtgtactcctgggtgaaccctactaggactgggaagagcaagccgtggaaaggctatagggcttgcacgtacaagaaaaacatgtgtctataaaatagtacactgctgtgtatttatctaagtcagtatgtgaatgcagaatctgaagctggactcacccccagagcatgggaatccccacaagagcatgccccaaactgtcctgagatggagccagttgagattccaaagaaagaagcccaaataccagggtgatctgtccaaaacacttattaggggaacttacagagggctgcagcagtccttgagatacacaagacaaaaggggcgttctacgtaggtttgtctgcagaagcgggtaagggtagggagttcatatgagggtttcaggaattcagctcagggctagagccagttagttttagtgttttggacaacgacctagatgcctttattagtacttaggaatgttcaaagccccagtttgggttcaagcctgctgggaaaaacctgcgtctggccgggtcacgaaatggtcaaggcagtctgagattttcggttaggacacagaaagaaggtgtgtgtgtgggaggggaagtggggggacactactgtgaatgtgctctgtagattctcaacttctctgcaaatctaagatattatttttataatttccacaggaaatctgagattagtttagtcaaggaaggccgagaggaagatgtcttgccattatatcttaaggaaagtagatggataggattggaggaaattggaatttgagcaattagctgaaaaatgacaaatgtatattgtaagagcatatctgataaggaaaaaatgaccagtctgatagcactggatatttgacatctatctgggcaaatcaatggagccttgagtgctaggtagggaattctgggtgatattcagttggcctcagcacatctgttcttgggttctccagggaattagcaagcaacattttctttactgcatgtggaatggcaatggcagattaattgtgtcctctactccagctcttgatccaggcacttatacaaggactatttgccatggtccctcctcctaggttgcaagcttgctctggattatctgatcatggtgggtgcagatgtctaccattttgaggacccataattctcacaactttctatttccccattctgtttttggtgtgaagcagtttctcctttacgattctccaaacaaagagacttactatatactttcttctggacatccactcacataaatgtggatatagagtaatttctggggagttaatctgaattgactcatatgtgattagcacttccttattgatcaaggtgaccaccaacctcttatcattagtgcagaaaatcattttaaaatttaatctatggcaagacttctagctacattaaactgaaccatgtagaggtaaaggtaatctgaaatgcactgtcagttaccatactgattccaagaatagattttattgtatttattcattcaacaaatatttattgagtatctactatgtgctaggtcctgttctagctgtgggaatacagtagtgaatatgattaaaaaatcattcctggccaggcgtggtggctcatgcctgtaatcccagcactttgggaggctgaggcaggtggatcacgaggtcaggagattgagatcatcctggctaacatggtgaaaccccgtcactactaaaaatacaaaaaattagcaggcgcggtggcgggcgcctgtagtcccagctacttgggaggctgaggcaggagaatggtgtgaacctgggaggcagagcttgcagcgagctgagatcgcaccactgcactccagcctgggtgacagtgcaagactccgtctcaaaaaaaaaaaaaaaaaaaaaaaaggagtcattcctgatgtcgtggagcttatattttggtggaaggagacagaaaacaaactggatgaataaatgaaatattttttatgttaaatggtaggtatggtcgaggagaatgttgagcagaaatatggaatagagagtgtggtggagggtttcagtttcagatagagggatgagggaagacctccctggcatgtcattgagcaaagaccttgtttgatatgatgtcctaggcttgtattctccctctcttgatgattccatgtttgtcccttccaacactgttacttgataaaagtggaaggaattcctggataagactgtcctctgttcggtagtctgtgggtagccccaattacttgatagaagctccaaataagttctcaaggatcacttacaagaaaaagtggggttgtcaggcttaagttaaaacatgtaattctgcttaagatcaggtctcaaatagctaagaccaagttctggagttagttataatggtttatcttacccaaaatacccacatcaccaacttaaaacaatttaaaacatttttgtgttatccctcctccataaaattgattctgcccttagcaattatctgacattaatttatagagtaatttcatgttctagttgttttcccaagacatttccttgtttatccatttactatttgattttaatacaaattataattttctttttatattaaaaaatcttttgattctagtttgatttccttgacaaatctccagtcagggggacatctctgacattatatgaataatgtagttgatacagttgggctctgtgtccctacccaagtatcatctcaattgtaatctccacgtctggagggaaggacctgtaatccccacatgtcaagggagggaggtgattggctcatggaggcggtttcccccatgctgttctcatgatagtgagtgaattctcacaaaatctgattgttttataagcatctggcatttcccctgcttacacttctctctcttgccgccatgtgaaagtccttgtttccccttcaccttctgccatgattgtaagtttcctgaggcctcccagccatgtggaactgtaagtccattaaacctcttttctttatcaattacccagcctcaggtatgtctttatagcagtgtgaaaaaaaaaactaatacagtactatattatttatggcagggcatggggagaaagagggagaaagaaaggagtaagagaagaagaagaagggggtgagagaggaagagcaagaagatgaaaagcaaaaatatttaaaaaaccgtatttttagtccgccatttctatttagcaaacttatctggttatcttttattacctgggactctaaggcagaatcattacagacagattttaaatttaaaaaattatttttcacatattgtttgtataccaatgtcttatacttgtttcatataatggcatttgcctttagcttctacaacctttgcagtcttttagtttgaatagagtttgatgtctactgcaatgtaacatgtacaacaaattgttaatatttcttgaccaattcaaaacatgtatcagggattatctcagctatttgatagattacctttcatttcgttcaggctatggagatgaaattagaggcgcagggttggtgtgtggagatgggtattgacagtcaattctcccagataatataacaggtaagttctgataggcaatgatgctttctccttcttttccattatgtattttcctgttggcattaatcatattcctcttcttctacagatttacatacaaatatatatataacatacatgtgaaagactattattctaggcattgagttcagaaaaggtcttgtcctcaagagattatagtctggtgagggaaacagacattttctttcatagtaggtatcacagtttccaattatttatttgcatgctaaccttcaatatttgaataaattataagaaaacaatattttcaggagactgcagttagtttttttttttgttgtttttttaatgagcatagggtactgaatatactgtgggtgtcagaggaagtctccttgaggaaacgtgtttggataggaatagtcagatgaagtggggaggtttgtgaggtggaaaaaagttccaggctgaggaaacagcatatgtgaaggtccagtggggacagagatttgaagagatgaaagttgtgtaagagggagagggataataaatgaggcttaagaagtatgcagggtcaaattacattatgaagagctctgtgggccatattagttatgacatggaagacttttaagtggagtcacagacacaagcagatttgagcatttgaagagtgctctctttgctatgtggaaaatgtttagggaaggataagactgacagtgaaggtacaaggtggtccaggagagacatagtggtgacctagactagactgacacagttagaagaggaggggatgttctcaaaaacagtaaggaggtaggtagaatctgcaggactcgtttgcatttggaagatgaggggaatgacagtcaggcatgattcttgctttctggcttggatgcctgtgtgggaggtggttgcaattttagagaaagagaacactgaggaggaacaggcttggaaggaagaagttgaattcatctgtggacatgttgaatttgaaatatccagcaggcagttgcatacatatgtttattgttcaagaaataggcatgggctggaggttatggtgagtcctcatcactaaataggaggataatggggcaaagagagattctaggaacaaaccttgacaaataccaacaaagaagaagtgaccagagaaggagcataatgataataataataataatagtggtaaaagttaaaacatatatgacacttactatgtgccaggcactgtgttatgtgtttttacatatattagatcaatttaatcttcttgagaggttggtgctactgtgatccctgattttacagatgaaaaatatgtgagccccagaaaggttaagtaacttagagactgtcaccaaccagtatatggtagagctgatttaaaaccaggcatcctagcttcagagattgtgggctttttctgtatattctactggaaagcatgggagtgcactgtccagaaactctgggaagagagggagttatcagccttgttgctgcttagaggtcaaggaagattaaggctgaaagttgccccttaggtttagtgacatttgccatttataagaacatgcttgctgtcatgacagcctgagaaggcagacagcagtaggctgagggcctcctgggagatgagtagtgtagtgtagatgatgctgtccagaactttggctggaaggtgaggagctaggactaggagaattctcaactcctcatgactgggaaaaaaggcatggaaaggatttgatttcggggcagagcagagaggggttctttatgagaggaatgaaattggtttgatgcctatcagaactctcctgttatattatctgagagtattgactggcccatttctcttattctagaaatcgttttctagaaggaagcgggtatggcctaacatatttataaagtaatacttgattatatgttattgaatttgttggtttttaaaaaaatctctacagctgggtgcagtggcatgcgcctgtagtctcagctacttggaaggcagaagtaaaaggatcccttgtgcccaggagtttgagggcagcctgtgtaaaatagcaagatcctgaagatcctgtctctaaaaataaacaaaaacaaacaaacaaaactccgcagccatacaatgattagttgactaccattacctattagtcagcagccttaaatttggatgcaaaacctatggccagaaacaaacagatttgtgacttctctcttgagaaccttgggaacaaatacattatgaattttaaccagccataaatggagtgctttcacccagggcttttccttgtaatttcaatcaggtttaattttgaccgtaggcttttgtctaggttggttagatcaccatctctgttataacctccaaattattaaaaagctcttctgaaagattttatggaaggttacggcatgaaatggcctatttctctgtgggaaggcagggctcagaaaaatgtgacaaacgtcacagtggaactgtgctgtgtcaaaccacaagtggtgcctccatacgaaggtggactgaaacgtatcctctaaaattaggtgtaatttcatgggtgatattctttcctttttctattactgagagctgagattactgagaacacttttacattgaatgttaaagcatgttgattctacacatttttttcttcccaatcctaaatccacagcatgtgtttgatgagattttaaaactttttagaataattaaaaaaataacttcccaatgaaggagaatgatttataaaatgatgcatttaaatgtaaagtttcatttaaggtaaagtgttatttcaaacaagtttatttaaagttttattaaacttatttaaatgtaatatgcatttaaatataatttattgttttaatatcttaatttttttgtacttctagtttgtgtgtgttgaaatatttgcagtatatttgcatattatttgaaagaaattgtgtaccataaatggagctttgctattatggctaaatgcacatttttacaaaaaagtgtgagattatctgctaatcactccagaatcccatttagtcattaaaaatgtaaagggaattaatgacagaaagatacagttaatgattaaatgaaatgtagttataaacacagcaaagtataagcaaaagcagctaaagcatcaatttggtacagctttttttttccttctaaacaggccttgtagataattatacttcttgaatcatttgtcacattgtacatttgttcacattacctataaagcatatttcatgaggttcatttcatgattgatttgttactcttaataaaaagtgcttgagtctgcccctgttaaaagaattcagtgactttttgcttgagaaaattcatagcgaatattctttgttggatgaaaaacagggcagtgatgccaactgagaacgtttttcttttcagttctgggactgactttgagagagaaggaacaccttgtgctctcatggtgcgctgctcacatcctaagcttagtatcttttctgagagagagaaacatgtggtttttccagtttgggcctattctgacaagactctgctgttgagtttataggctgattaaagggtacagagggaactctgtaattatgctcatacttgaacatggctatatatcatgtttgagaaatttcctgtattcaaagaaaataaccaagctggtcctatgttctgttttgcctgcgtgccactaagtgagaaaatgtatgttcctttcctgcttcagctgttgtttactttgtacagaattttctactcctttgaaaacgaccatttttctgactcttatggtttggtgagagtctgagaaaggctttggctttaagaactttcctggtggtttaagtcaagcttgagagagaaagtcattgttctccctgtcctcatacttcccttttcagcttccttataaagatgggtagttatgacctgcactctagctaagtttatcccaacagtcttgaactacttgtcaacatttatgttttcccactggtattttttttcaaatcattattcattcaacaaatatttattatctattacatgctagctattgtgctataattctaagatgaggatgaaaaggataaagtatttacacacaatctttttgtatccagaaagaacgccaacaagtatgttgaacatattttaattaacttaagaatttaaaaataaatttaaaacacgaattccccattatgactatgtcaaattaacctatagtaatgaaaacagcagtggtctcttgtattaatcggttctcacggtcctataaagaactgcccaaggctggataatttataaaggaaagaggtttaattgactcacagttccacatggctgaggaggcctcagtaaatttcaatcgtggcagaaggggaagcaaacacatccttcacatgatgataggaaggggaagtgctgagcaaagagggaaaagccccttataaaaccatcagatctcctgagaactcactcaccatcatgagaacagcagcatgggggtaaccgcccccatgattcaattacctcccactgggtccctcccatgacgtgtggggattatgggaaatacagtttgagatgagatttgggtgaagacacagacaaaccatatcatccatatagtttatcttagtctgtaccagggcttcccttaggagtgagagagcagagagggaaacctaatgacaaagataaaatttgtgttgaaagcctgctgcttgcatctgctttgattcacttggtaaatcctgttaggttgagaagttcataaaactagcaggcttctgaactatttatgaatttgtacttaaacacacacaaaaaaactgaaaacaagcactgtataaattagttccaatggaaagacattgattattctgaacggacacagcacaatacacctctatgtgacttctcacacatgcagattctcattttcagggatacggacacatgtgtacacacactcatatacagccgcacattcctgtgtattctctttgccggcccaccaaactgaactttcctgaattagggacataaaattctactaaattaaaagtctggagaatatatgcctctgcccatctttatcccagtaagattgaactattagtggcttcattgcttgtgatatttataacattaggtataatttcaaattagcatttgaaaataatataataagagacattcttaagatatgatgggttttcccaaaaagtgctatattgactaattgatttcatttttggaaggtagaaatgaggttatcggtggagactagaggataaggttattcagcaagcctaaggaagaaaggcaaattgtgactccggatctctgcataagcatatggcagatggcacagtggagaacaaggtgataagaacaggcagagaaaagtcacactgtcataagccccaaactgggatctctcgttgctgctggcttggaccaagctcaagaccttgcccttgcccataataaaaagctgcagacagtaaaggctgcacatatcttacttcttacaatacaatgatggctgcatccttaaataaaattgtaatataactgcacaatttagtgtctctagattaaatgtagttttaatctctataataataaaaatataaaaaagggtagaaccaagagatcagtgaattaaaaaccaattaatcagctgactgagatgtgcttaaatatatttaacacatttgtggagaaggttaccataccaatagagtttacaacatttcgtacactttaaataaatattgatgtttgtcttagtctattttgtgcttctataacagaataccacagaccagataatttataaagcacagaagtttattttttcacagttctggaggtggagaggtccaagaacaaggtaccagcatttgaggtctggtgagggccttcttgctgagtcctcacatagaaggtagaagggcaagctaggtgaatactataggaagcctcttttttattttatttttattttactttaagtcccgggatacatgtgcagaacatgtaggtttgttatataggtacacatgtgccatggtggtttgctgcagctattaacccatcatctaggtttgatgccccctcgtgcgttaagtatttgtcctgatgctctccctccctttgctcccctcccctgacaggccccggtgtgtgatgtttccctccctgtgtccatgtattctcattgttcagctcccacttatgagtgagaatatgcggtgtttggttttctgttcctgtgttagtttgctgaggatgatggtttctagcttcaaccatgtccctgcaaagaacatgaactcatcctttgttatggctgcatagtattctacggtgtatatgtgccacattttctttgtccagtctatcattgatgggcatttgggtttgtttcaagtctttactattgtaaatagtgctgcagtaaacatatatgtgcatgtgtctttatagtagaatgatttatattcctttgggtatatacccagtaatcagattgctgggtcacgtggtatttcttgttctagatccttgaggaatcgccacagtgtcttccacaatagttgaactaatttacattcccacgaacagtgtaaaagcgttcctgtttctccacagccttgtcagcatctattgtttcgtgactttttaataatctgcattctgactggcatgagatggtattttcattatagttttgatttgcatttctctaatgatcagtgatgtagagctttttttcatgtttgttggctgcataaatgtctccttttgagaagtgtctgttcatatcctttgccactttttgatggggttgtttgtttctttcttgtaaatttgttaaaggaagcctgttttataagggctttaatctccttcatgaggaaagagtcctcatgacctactcacttcttcaaggacccaccttttaatactatcacagtggcaacacctgaagtttggagaatgcattcaaaccataggaagattttataagaaatagtttttgttttatattattattattactatttttgagcaagagtctcactctgtcgcctagctggagtgcagtggtgtgatcttggctcactgcaacctccacctcctgggttcaagcaattcttctgcctctgcctcccaattagctgggattacaggtgcccaccaccatgcccagcttttttttttttttttttgtatttttagtagagatggggtttcgcagggttggccaggctggtctcaaactcctgacctcaggtgatctacccgccttggcctcccaaagtgctgagattacaggggtgagccaccgtgcctagtcagaaataatatttaaaatgtgtagtagcacactacttaattaaataagcattatgtaggatattgaaataatgttgcccttcaaagacctgtattcaatacaagaatgaaacttataaatgtttaaacatttgcaaaaaaaaaagatagtaattctgggggaagtgttggctagtacaagacagacattttactgtggcatggtggctcggactgaagaaaaaattcatattttttaaaaaatgagataaaagtgagataattttttggggggtgagataatctgtgctaaaaaaaaattaaaggtatccctgtttggtaaacttcacttggaatattcaaagtctccaagatttgtaaaatttaatgaaatatttgactttaggctgggcacagcggctcatgcctataatcccggcactttgggagggtaaggtagggggatatcttgagcccaggagtttgagaccagcctgggcaacatagtgagtcctctctctatccaaaaaaaaaaaaaaaagttagctgggtgtgatggcacatgcctgtaatcacagctactctggaggctgatgtgggaggatggcttgagcctaggaggtcgaggctgcagtgagccatgatcacatcactgtactccagtctgggcaacagagcgagatggattccctactaaatgaaataaaaagacttacagtccttgtatattacatgcattcctgctgcacagatataaagaggctcttaaagttgatttaagaacactgaaagtaatataacaaggaacaaggttgttaaatacttacagtgtagatttaaaatcaagtaattgtgtgtattttctgcaccactggatgtttatacaattgttagcataaactgtgtgttccatttttcattagcaattttatctccctactgaatgctagacttttagttgttatttgttatagcttaatttgtttcccaacagtgaaaagagatatggacttgtagattttcagctatttcatcttacaaagctagtgtaacctgactacagatgactccaggggtatattactttaaaaggaatttggactattactcagcagtctgtaagacacattcttttttcagcatttagggggagttgagagaagctatggcaagccatctcaccattaaatctcctctacaccactgctgccctggctcagacccttaccatctctcagggaagccattgcaattccttccctattggtcctccccacagtgtgacttatcagacacactgaaatcagagtaaattttctagaatagattagaccatatctcttccttgcttacatgcatccagtaggtacttccataaagccgacattttaaagcacagtagtcaagtcacatagtcttgccagcctcatcttctgcccctgtgaacccgagaccctgcttgttccccaaacaagccatgttctttcatgtgtttccttttgactggaatgttctctacttgttaactccagcctctgactgggtaaggcacatacattttgcaatgtcattgcctctgtgaaggtcttcctggagtttcccacacccaacaaaaatattgctgtattttcttggtcccagtagctctacaacatatctttattatagcccttaacatttattgtaattttgaaatgtctacttccctttgactgagaaattctcaagggtaaggctgttttcttcttgctggtcctctgacatgctgcatgaacacagtaagtgctcagtataaattagttgacaaatgattaaattatgcttagagtttttgctttataaaagtttaaatattattttctttgtgtataatttatcctatttgatactaacacatatgtattactattataagtcattttagcattgtttaaggaaataattatggtgacatgaattaaggggcaatattctattccaaattgtttttacttaagagctgctttacattgaaactgcaacaaaaataggaatgttctaatgtcatttttattttaaaattcagatacagtcatatctttttgaaatctattaattcttaggtctaagctcatgcatttttataattaacactcataaatagggctgtatttagtaacatatttgttgatgatgttaattcaataaatgaaatttcagaggcagtgtagtatggtggttaagcaagctggctttagagctaaactgggtttaaatattgcctccactaattactggttgaataactttcaaaagctactgtgcctcaatttctttttcttttgaatggagataatagtagtgaccttccttataggattgttttgtgaattaattatttcatgtaaaagtgcctgggcacccagtaaagtcagtaagtactaactcttattattattgttcctatattactgtactcatttcttcctctgtgatctatgaaatcctggttacttaattattggtgtggcgtgctttattttttttatgagtattttccagtacaagttgcagctttagttggaagctcataggtatagaagaagatttaattaaatttataacagagagagagttggaaattagaaactaaattgaaatctctatttcctttgtgtaaaagtccttgtctgaaacagtaggcaatttagaagtcaatatgcacaaagtgcaatggctcaagtctgagagcttgttcagactgtaaactaaaaaaaatattgaaatggacaagttttgctatgaagagcgagttttatagtctatgtgtatatgtgtctatgtgtgtgtataaagatagtattttagaaagtacctagattgcacctagattgtaagtagaggcaaggaattcataatgaagaattcctggaaagaggactaagaaatcggggggaaacaagtttattaataatgctctttatgatagaatttattcgatggattttatggataatgtgagtttctcaggtttatagagatagaagatattctttttaacgtaataatttatctgattattatgtgagcaaaatgacagaaaataatttctgagaggaaggagagataagactgaatgaatgatacgattaatattttcccagctctaatcatacctctgcttatctgctgccttttttattggacacccccttctagtaactatcaaaagtagtgtaagggacctgaaaacagattacagatcttttttttttttatttttttgaggtggagtttcccttgctcttgttgcctaggttggagtgcaatggcacgatcttggcttacagcaacctctgcctcctgggttcaaatgattctcctgcctcagcctcccgagtagctgggattacaggcaggcaccaccatgcctggctaattttgtattttcattttagtagagaggaggtttctccatgttggtcaggctggtctcgaactcctgactgcaggtgatctgcctgccattgcctcccaaaatgttgggattacagacttgagccagtacgcccgacctaaactagctcttataatgtataaaatgcccttctcttaaactctgatgttgatgttgcttctctaaaacctttgctgggaactttctacctcaaagagaagctgtacagttttattatactatttagatttagttatttcagttttattatactatttagatttggttagtaccagagaattattagtctaaccctgcattctaatgatggcaaagaaatagtcctgcgacatcccacttgaatttcttgtaagtagattatttctctttagattaaaatattatttttacacaaattttctcaatgtatattttctttagtggttcaactcttaattattctgaaatcgacttttgagttatatgcctaaaagtagtatactgttgaataaaatagcaaaataatttttgataatgctattattatattggatcttctttccaggcactaaagcctcagagactatgactgggaactttgtgtatctttagtttaattcttttctaattacagtcatctctggaatttctagattttgtatagactgctgtaggagtgattatgattttgaatctgatagactcggtttaaacattgattctgaaacttgctttttatatgatcttggacaggttagttcttcaagatgctcaacatgatttggtgagatttaaatgtgattacctacataaaacacttagctcaatgcctggcacagattggcaaacaccacttctaattgatgtcagatttgtgccttgccttacctgccatgaattaacaatagaaataaaatgtgaccacatttagagacttcgagatgacacagatcttgcttcaaatggactgtaaggaagagagcaaagaaaatgcttacctttcattaccagcacttcctttccagcatgtatgatgataaatgctaatttttatttatctttgagacggaggctccctctgccacccaggtacccaggctggagcacagtggaacaacctcagctcactgcaaccttcgcctcccaggttcaagagattctcctgcctcagccccagagtagctgggactataggcgcatgccaccacacccagttaatttttgtatttttaatagagatggggtttcactatgttggccaggttggcctcgaactcctgacctcaggtgatcctcccgccttggcctcccaaagtcctgggattacaggcgtgaagctcgcaatgctaatgctaatttttaaaatggatgattttcttccctgatatctgaaaagtaacatttttctatttcctggcataaatatttcaaatatggaatgacttcgatgagcatataagccacatttattagctttaaaaaccccaggaaagagaatggggtttacatcttattacttatcagtaataagatgctgtagtagcatgagaaataatccttgcctgataaaaaaccatctgaaacaaacagtaaacctctgctattgctgctgagtctcagaactgggcacttagtcatacaaacaaacgtggaattgaaattgaatttggccacaggagtgcctccaaggtactgtcgcttcttctcttttgagttcttcaaagaggtcagacttgagcagaaggatgttagacttttttataggcatcgttcaggttgggttgcttcctcctcaccaattaatttatgttagacgttcgtaactgcacatctcctttttttctgctgctttattctctgagttctataaatagaatctctgcagaatgtatgctagctgactagattgtgttctaaaatgcttcatgtgtaagagacatagtctcctgtgaagtgagaagctgatgcagaaaagaaatgccaaggacaaacaaatgcaaatttttctgctgtttttctgatttgtaaacaatgttgtcagaagctgttccttaaatagtttctcatgacacaaaacatgctacagtgctgcttaaacatgtgcactaatttggggctatattttagttatcatggattaagacatatgatttaatggaattatgaatatttgattacagtggcatttaaaattaatctgattatattttacagaactcaatttttctatttaaaaaaggagatctaggatgggtgtggcggcttattcttgtaaccccagcactttgggaggctgaggagagaagattgcttgaggccaagagtgtgagaccagcctggaaaacatactgatatcctgtctctgtttaaaaaaaaaaaaatttaaaaatttaaaaggaggtatgttacaaatgagagcagtacatatctgtcttggggttacaaaacaggtttacaatttatttaggatatttagtagaaccactcatatagattcttttttttttaattatactttgagttttagggtacatgtgcacaatgtgcaggttagttacatatgtatacatgtgccatgctggtgtgttgcacccattaactcgtcatttagcattaggtatatctcctaaagctatccctcccccctccccccaccccacaacagtccccagagtgtgatgttccccttcctgtgtccatgtgttctcattgctcaattcccacctttgagtgagaatatgcggtgtttgtttttttgttcttgcgatagtttactgagaatgatgatttccaatttcatccatgtccctacaaagaacatgaactcatcattttttatggctgcatagtattccatggtgtatatgtgccacattttcttaatccagtttatcattgttggacatttgggttggttccaagtctttgctattgtgaatagtgccgcaataaacatatgtgtgcatgtgtctttatagcagcatgatttatagtcctttgggtatatacccagtaatgggatggctgggtcaaatggtatttctagttctagatccttgaggaatcgccacactgacttccacaatggttgaactagtttacagtcccaccaacagtgtaaaagtgttcctatttctccacatcctctccagcacctgttgtttcctgactttttaatgattgccattctaactggtgtgagatggtatctcattatggttttgatttgcatttctctgatgaccagtgatggtgagcattttttcatgtgttttttggctgcataattgtcttcttttgagaagtgtctgttcatgtccttcacccactttttgatggggttgtttgtttttttcttgtaaatttgccatatgtagaaagctgaaactggatcccttccttacagcttatacaaaaattaattcaagatggattaaagacttaaacgttagaccgaaaaccataaaaaccctagaagaacacctaggcattaccattcaggacataggcatgtgcaaggcttcatgtctaaaacaccaaaagcaatggcaacaaaagccaaaattgacaaatgggatctaattaaactcaagagcttctgcacagcaaaagaaactaccatcacagtgaacaggcaacctacaaaatgggagaaaattttcgcaacctactcatctgacaaagggctaatatccagaatctacaatgaactcaaacaaatttacaagattctttattatccaaagttctaagtcattgataccattctttctgacaaaaagtgtagatattctatttgatttggttattagagtatttgagagcctggaatagaaataagcctcactgctgaaactgtgaatcaagttctatcactgcaggctctcattaaggttttgaatcataatacactgtagttgcaattgcatcccaacaatctaggtgcagtggaaccttatctctttgatctcataatttctgaactatagattgggagatatattttcaaattaaagaccatgttaactggaaaaacctaagatatctagcctgatagctacattttacggatgtgaaaaaccacagattggatgagttagctgacttgtctaaggtcatacagccacttagtaacagaactagactccaggtttcgtgcctcccaataccaccgttgctcttgaagtttgactacttctcattactttcaagagctttctctaaggagacaactttttgaaacatctgagtctgcagcagagactgagaaggacttgggtgtaagtggtatattttggaagtcactttagagggacaggagtgagggagagagtagaaagagagatagaggaagaggtttctgccttgggcagtagggcttgattgatcaagacttcctgaaggcaaatcaggtatcccagggttgtctttacaaggacttgaggcagaagcacttgggagcattagctgccatccctcattgattgaagattgcccctggggacattaactcttctagtacttcagaatgggcttgttcaagggctgagcaggtttccttggagttgagaaggccccagccataaagaagaaaggtatggtgcctcctggattcaggttgctgccaaaaaaagtcatgtctgagcttgtttggaactgtccactgcagctgaggctgaaaaatcagagatgagtgaaaggaagtggctaagggcaccaataggggctgactttctcataatatcatgtgattgcactgcttcaaatttttacaatggaatgacttagaaagttccatcccttattcaagagtatttattctagttattttgcatgaattttctgaaatggagaaatgtatgtctccatccttgctaggtgaggaatgttttcagtctttggactctgaaatgaattttcagcagtttctctctataattcctgttctgttcttcttcacttctggccccggcacggcttctccctttacccttctcagttaatttgcctgcctacttcccatattctcttgtgttccctagttctcacctcccaggtccaccttacttgtctcttcctttatcaatagattttccattctccaaccaacgttttacccaccctgtttcagtggaagtgatgtattgaaatgctattttaatcttttgaaactttgaactgaagaatgagtgttggtcccttctgctatttaacttctgagataccctccaactcagaggttcaataaacatagattcaataaacatagaaaactccgcctttctacttagagttggaagggactttagagataatctaggctgtcccactttaattttcaagtgaagaagtgctatggagagagattatgcaacctgttcaggtcccacaattagtaatggcagggctgtgatgattacttagggatctttccaatgtgtcatactgccagcctaatataaattattaatttatgtaaatgtctgtaaattgcaaacttctggtggctagaggctagatctatttacttgatttatgtaagtgctaccataggcacagtaatagataacatagtaactgtcagacaagatcagagaaacccttcaaatgatgcaaggaaatgggggacaaggcctttctgtcatctcttcttctttttccactgtgtgactttgggcagattatttctccttattatattatttagctttctcataggtcttcccatggattactgaagtgtttaaatctatactttaaaacgcatggggcaagagagcctaaaatcagccaattttttataattttgaactttctctaattcaaaatttgaaactttctctagttcaaaatagtttttttagttttgttatgagtgggtttctccaaataccccaaattatgatactcctttaaaatatgtaggcaacgaaaactcactggagaatattgtttattctccagtggttactgctattttgaattctacataaaatcaaccctgaataggttagctgctatataaaatggaatactgtcccctcaaaatttatgtccaccagaaacctatggatgttattttaattttatttggagagacggtctttggagatgtaatcaggttaagatgaggtcctactggatttgagagggcccctaaatccaatataattggtgtccttatgagaagagggaaatgtggacacagagacgcagacacattgggagaaggcaatgggaagacagaggcagagactggagtgatccagctacaaggcagagaactccaaggattgctggcaaccaccagaagcaagaagcaagaaacgaggctcctctagagccttcagagagagcatggtcctgccgatagcctgatttctgacttacagcctccagcactgtgagagaataaatgttcattgtttcacactaagcttgcagcattttgttatggcagctctcagaaactaatagagatgctaaaatagtatagcaaataatttccaggattatttatggcatccttatgtagcctggaagaggtatgaggtcaaccagtcaagactatttcttgagtatttagcacctgctcactaatatgttagaattaatatgttagaattagtaatatgttagaatgtagatggtgtgaaagaaggaaaagacagagtttgaactctaaaggaatttatagtagatttgggtatataaatactacaaaacaggaagcataatcaatagataatatggcactgtactgattagaagtgcagtagtatttcaaagaagaagacttcattgtgagcttcaaagaaatcttcctagaaatacagtatttaagtctggccctcagaggtgggcaggactaaggagggcagagtaatgggcatcttctagggagggagaagagcctgaacgaaagtacgaacgtgagaaggaacctcagatgcatgggaggctgatctaattggagttttgataattgagactaggagagagactctaatagaaaaggaaaagcgtaatagcccagattcatagtggtgccccagagaacaagtgacaaaacgtggttttggaatacaactttgtcagagaatgcagcatactgggtggcagtggtgggcacgcctcttggaaggacaaacctcttttggatgtgccagtgccctactgtgtgattttgggcagattatttctcctttatggactagatagagactgcaaactgaattactttgggataaatccatgtttagtaaggctcgcacatggttaaaaaattttgagtattaattagaagctttttaaaatccagcattaaaaaatccctctcatgaaaaatgataaaatctgaagcataaggtgggcatttctactacgacaacaactggctgccgctaatgccgttaggatggcttgtgtgttgtaggttgccgggattcagctcagcttcctcatgcatctacgatacctgtgtagtccctgtgggcacttgaatttgcagcccctggaacaatctctgtctgccactactgctttcttagtcaatgaccattttcttacctgggatgaaaatcatatcaccttataaattattgttcatcttaataaaagcaaaatgctttgcttttatgtcttatttcgaccaatgagaaataattgcaaattcacctgtatgttaaattcatagtgtttttctgtgtgcatgtatatgcatatgtgacagggagtcagagacatacattgaagttgtattttgttgaatttactgtgagatatccctggaaaggataatttgtacatagatattattagtcatatgaccaattcagatttatgtttatatgtcaattctctctctcttctttccttaagaaaaagttggttttaagttgtttggtcaattttactttagaatagaaaaaaatatataaatgctagggtttaatgcgttgcaaaattttttcagatgtgaatattatttttggtgcatgcagtaagtcatgtattgctaaggatttgctatgctaatatacttccatttgctatctctttttctttgttgtatggtgtagtgtttgatatgatttgcatcgattctggaggaatgaaaatttcagtgtaacatcagcattagggagtagcaacagtgtttgttacagaggcatttctaatgaagataccactctagcagtgacgtcctttaaaaaaaatttatagacaaatgtcatttaagaataggtatagagatttacttgcacagaagagaagagtcttaagtatacaactttttactgctttggggaagaaagtaatactttattttgtatttctatatatctcagaagtattaaagactttttcaataagtctacttgaagaaaagttaatataatctgcatttgaagttgagtgacttctgtatacctaatttttcttgcttgatatgtctgtgtcagcattaaaaatgtattactttgccaaggttatataattttggttatttgcattagaaagcaaccctgtacatacacataaataaaattaacaggcaaaaactattatggtactatattcttgatgctaatttgacaatatactacatcataagtactctagaaaatgtttacattgttgggtttagtattttcctttctgaaatgcatttaaatattttttaattttttaatttttttgtaggtacatagtaggtgtatatgtttatgggatacatgagatattttgatacaggcatgtaatgcataataatcacatcatggaaagtgggatatccatctagtcaagcatttatttgtgttacaaatgatccaataactcttttagttattttaaaatgtacaattaaattattattgactatagtcagcctgctgtgctttcaaacgctaggtcttatgcattttttctaactatttttttgtacctattaccattaaccaccccctccatgccccgcatcccccactaatcttcccaccctctggtaaccatccttctactcttatctccatgagttcaattgttttgatttttagatcacataaataagtaagaacatgtgatgtttgtctttctgtgccttatttcacataacataatgacctccagttccatcctctcaaatgtattttatgtgtgtcatcaaagactatatagggatattcatctattgtaatgtataatagcaaaaattataagcattagaattttttaaaagtattttaaacattaaaaacatttaaaatgttcattaataagggataggttaaaaataattctatgtgttggaatactttgtagacattaaaacctagaaaattttatggcacaaagctttcattttaagaggaaagaaatagaagattgtgtgtgtaatatgatcttaagtttgttatgcatatcaatatattcccttatcactctagatggtattatggttgatttgtaactttttatgttgtatatctaagtattttccttgcatgtattctctttgtaatcagaaaacaacaacaacttctatttctattgagttatatgcagtaaggtcatgtatcttaaatgtacagtgtgataaattttcgcacatgtatatacctatcgggttggtccattttcatgctgctgataaagacatacccacgactgggaagaaaaagaggtttaattggacttatagctccacctggctggggagggctcagaatcatggtgggaggtgaaaggcacttcttacatggcagcaataagagaaaatgaggaagatgcaaaagcagaaacctctaataaaaccatcagatcacgtgagacttattcactaccatgagaacagtatgggggaaactgtccccatagttcaattatctcccaccgggttcctcccacaacgtgtgggaattatgggtgtataattcaagatgagatttgggtggggacacaaagccaaaccatataacctatgtatccaccaaacaggtcaagatctagaatatttccaggagcctggaaggctcctttgggcctccttgcagtcaataccttccaaaggcaatggctcttctgacttctgtcattctaagttagttttgcctgttctgaacttgatataaatggcattatatggtaaatactgtttttgtttcttcttttcactcagcattatgtctgtaaagtccatccatgctgtttttttgtggctgtagtctgatcttttgcattgcttgtaggattccttgtgtgaatatatccaaatatattttatcatctctactgttgataaacatatgtgttgcttctagttttggctcttttgaacgttcttgcacttgactttcagtgaacatatgtacttgtgtatgcatctggggtggaagtgctagatcattggatccctgtatgtttaggtttggaagatactgctatacagtgttccaaagttattgtgacaatttgtattcctaccagaaatgtttctgagttcagttgctgcagctgctacttggtattattgtcagttttagaaatgttagttattattctggttgtatagatatcttattgtggttttaaactgaatttccctaatgacaaacaatgttgagaatattttaatctgctttttggccacttggatgtcttcctttgtgaagtgcttattctactctcttgcccacttttaaaaaactgagttgttttttcttcctgatattgtagctctttgtaagtcctctgttgaataggtagatttcaacatctttccatgtctggtctttatactttcttaacagaggcttttgaccacaaaagattttcaattttaataaggttcaatatatcaaccttttatttttatagttattgcttttatgtgtgttcttttgaagaaatatttgcctatctcaaggacataattcctcttacttattttctagatgctttttaagcatttacatttgggtctgtgatccattaggtgtggtgtcaaaggaaagattagagtttatattattttgtttttcaaatgcagattcaatggatgcagaaccatcatattcctcactgcattgcagtggcatctttgccattaatcaattgtaaaaagtatatctatctatctatctatgtgtgtgtatatatatgtattcatgtatttatatatgcatatgtatgtatatgcctacatatttatgtacatgtatgtatatgcctacatatgtatctacaagggcatacaaatatgtatatacttgcgaaaaacaataaagaatttatgctcataagcttagaataccagcttaaataatatcaacgccaaaagtacacatagctttgtgttccttacactaatgccaggaaattgctgtgaaattgaacatagacaatccaatactgtttctccactattaagtttttaagtgtaagactgacaaatcaatttcctgtctggtcggactgtctgatgctggattcttctgattacaaaacactcctagtgtcgttccctgaattccagctaaaccaggaaccactgtaacatgaatttgggaaatgatctttgttagatatcacttaatatcctgcagtccctatttacattgtttcatctaaatcattaactctgagagaattgtagtgagttagactatgtgaaaaaccttaaatttattgtgaaagagtttgaattctaattttcggacagtattccagatacaatgtaatacatttgctattcacctttcaaccagaagtccggcaagtttcagaaatatttccaataagttgctttatatatacggtgagtaaggagcacttggaaggacattatgggtattttcatatgtgaaaactagtcacacgtaataaaaattagaatatggtatatagagtccaagaaagcatgtactgtgatgactaaatagaattactagtgatgtccatgttagtttaatataaagagcagcatttaaaaccattagttctgtccaaaaatagaagaaattgtttcatgtggtcacaagctgcttgtcactagaagtatttaaactggataaccagtgtcaggatgaaggaaggatgcctcaattggattggacaatggtctcaaacttccaattctatgtccatatatatttattagtacagaatgcacatagtactgacttgtgagtttattagttttgtcattgttaattccagaagaaatcatggtcagataggataaggatgtatacaaaataatagttttttatgagtctgccccattttgagatgctttccttctattggctattttgattcttttataaaataataaaagagaaggtgtagaagaacgagagatagagtctgatcgagggattgatctttctatttgtttcttatgaaatacagtgattttaacacccagacagtgtcttcacacttcctgtcttttgcctgaaagtggaattcttcagtagtcccaagtgttctggatcctgggaccagtgtgattctctttttagagaggcatgtgacagagggcttgcctttgacataaccaaatgtctgtaaccagaagcaggcaacacacctaggaataaagagtctcaccatttctaccatcatacttggggtagaaactactagatatgtagactatttctgcaaagggagagttagaagttgtcatcatttgctgacaaaatgtagttaaatgtagttacagtcctttaaagtctcatttgctctccacaaaataataaaatctgtttttcattgtgacagtgttgaaggtagaggtcctcaaattccaaacaagaactatcctaaaggtatcctataatgtaagatcagtgccattaaaagagtttatatagtcatgatggaaaaactgagaatcataaaagaggtaaagatttaccttggattatctataaaactaatgaataataagacgagagcctaggatttgtggtttataactttctcctccttagtattttatcttttaagcttccttattaatgttgagtcattttttgttgatattaatacatttatactattcaagcaatatgtgttacatttgtttgcatattagcttagatgtttgtttttcaggacaaatatgcacagcccacatggttgactctgttggggtgcatgtatgtgtgtgtgtgtgtgtgtgtgtgtgtgtgtgtaacttaaaactgtgtaatcatatagtgcttgggatcaggtgtcttaatattgtgtatctgtgggtctgactttgatcttggactcttacaggaaacctatataacagcccatcttaaaagtaatgttctaatgttctgacctgtgccacagtaggagatgtggagtaaataattaaaattgccatcatgaaaaacattccacagcaggaaaggaataaagaaccttccttgagaagaaaaaaaccactaaatcacacagtgagaaattaggaaaaaaataacagagagcaagccatcataaatagtgtctcaaggaagtgaactatatattaaaaataagactcaagtttaggaaggtgaaagcatttcaataggtttcaaggctgccagaaattttagaatcaacttttcccttgacatgttatactggtattttcacaatagtaatatcatatttatgttgcttataagaaagttacttgtggtaaatccaatgtactatgcacgttgatcagaaaccttcacacttcatcaagtcattcagtcgtatattacttggtataaaaatggatgacccatattcaataaatatattctctgtattttcaaataaaagccaaaatagagggcattgcaaattcacttagaatgatgttactaacatatgtcttgtgaacccagaaaatcagagataggtctcagttaatttagaaagtttattttgccaagatttaggatgggcctgtgacacagcctcaggaaatcctgacatgtgcccaaggtggtcggggcacggcttggttttatacattttagggagacatgagacatgaatcaatacatgtaagaagtactttggttccatctggaaaggtgggacatcctgaagcaagggcaggaagtctagaaaagggggagggagcttccaggtcagagataggtgagaaataagtggttgcattcttttgagtttctgattagcctttccaaaggaggcaatcagataaagcatgtatctcagtgagcagagggataactttgaatagaatgggagacaggtttgccttaagcagtttccagcttgaattttccttagtgattttggggcctgagatattttcctttcacaggctcaaacagttcaaaggatagtggtgtagtgcttaatctttaggcctgtatgtggcctggcacatattgttgcaagcttaggttgcgtttattaagcacttgctacatgccgggcactgctttaacttcctcccatgtcttcactctgattcttcttaacagttcaatggagaatatccctttattatgtccgttttgtgaaattgtcactgaggaagagagaggttagtaacttgcccaagatcacacaccttggtagcagtgctggaattgaatcgagactaattggctctgggggcatacttttgaccaccacgaacgatttctaggttatagccagaaatggaaaaagccccagttgttgattttctggttacttcagtattgctggaagcatctccttaatgcaattaccgtgcagactgttgaatgtaggctgcaggtggctgaaggcaatgtagcccttggtctttagttcctgagcatatgcctccttcacctattatattgatgcaatgcttgtgcacagagaggtcaagaagatctgcatgccggagttcatctgttctgtgtatctgaccatggtttgcctgccccagcgatggaaaggcagagatattcacgctgagcagcatcagtggggaatgtgggactgctttacagcctcaattactttttatttcagttatatattatgcagtagaacttttaaataaggaggcaagttaccaaataaataacaaaaaaccaaaataggggcaagatatcagtgccagcaaagaatactgtcccataagactttgaatttaaaatgatttatttttttccattttaatgtaaagattgtaggatataaaatgtgtatatgttattgatgagtgtgataataatgatgatgatagcagtatttaaatagcacctgactatgtgccaggagctattctaaggactttttatatgttaactcattcatcaccatattgagaatttttagtattatgaaatgaaatgaagtttactgaatacaatttaaatatcagaacagttagctttaataacttcaattgaataccagttcatattaacaaatttagcagaaaaggtagatggtcatttatttttaaatggtatgctttctttcaaatcccaggtagctttgggaatctttcttctaggtcagcagaatagatgcatcattcccccagtctattctaaactaagctaaaagcccgacgattcatcagtaagtagtttgtgggtattattcttggatagatgcatctaaatggactatttataatttaactaaatcatgtcatgaaacacattctcacttgcaaaagtggggatggcctgcaggaatttatctaaaaatagaggcatagagatattcaattatcatgtcctcttacaagtttattttttccccttttctttttcctctgtctaatcttcaagacagcaattcagcaaagaaaagtggcagcttgtaggaagactgtactcattttaagctatagcagaaatataggataatgccagatgtttcattctttgcaagaaaatgaaatgataaaaatcaatctcttttttcaattagataagaaactctttcttatctcccacccctttggaagcttaaggtattaagagatgtataaagatcacaaatagaggagtctcagcacctactctctattttcaaatgctcacttaacctctattctgaaatttaatgtgttcaataaccattttctttctcccaaatcaattctctttttttgtacttcccttttagtacgaatgatatcatcatttccctaatggactagtgtcagaatctgagtcattttcgacaggcctttctctgttaattgttatattcacctgttggttcactttatagttttgtctgggaaaatgtttcttgcctctataattctgcagctagagctatagcttaggacccattcattgcttcttgccttgacttagacaacagttgtgtgctggtgtcctacctctgttttctctaaatccatctgatgcaagactctgagactactactaaaatctttaatgattccctcttgccttagaattaactacacacttttcaccctggaaatgaaggaccttgacaatattccaccactctactattccctattaatgtcccctatttgcccaacaaatctatgtcccaaccaaactagactcttcacagtttcctgaatgtgagtcatatgtttctgtttttggtctttgcattcttttaaagctatttctttcccctgggataaccttggttctcatttccaccttttaaaatcttatttgcctgcatatgtctgtctcacaccactaactctttctcctttctctaacttacaacattctcttttctttatgcatttctatagccctttgcacttcccttaaagttccttgtgttataatcaacatcacattttataacactggttcaactccctagttcccacactcatgcatacatgtatgagttccttgtaaaaagtattaggccagttgaatggaattgagctttcatcactctaagtacctctcaggtacaaaatcagaaaggctctaagatctgcctttagcatattaaaaactcacctgaaactgtgcaatgtgagcccatggagtccttctattacaaggtagactatgtaaagacatatttattttctaagtaatggaccagaaaggacctcttctgaaaatgtagctcagagaactggaatctcaatttatgccactgtgagtcagaagaagattttgagttttgcttcttttttcccccagtatatcaccctagttatgcttcatttactcatctggctcttcttatgctacttggtttacaatttgaatgactgcccagatttagaaagtcactagacccgtgcttgaattatagactctaagcttatctcagccatgtaaaatacccagaattcaaagtgagatatttccctccacaaagactacatataaatgtgggcacacggagagtaattattattgcaacattagtactcgtggccttcatggcaagattttcatctaatgggcaaaggctatgtcagaaaaatgttagagttcaatctgtttttaattgctgaaattttcccaagtgaacagcaaatatatgccacatttttctttgattttccctctaaggaaatttatttttcattttgttatattgaaggagaaaattataatgtattatagtgtatattttgttttctataatatttctgggcacactacactgtaattactgttttaaaactaatgtaataatatctttggaattcttaaactgatgcaactgatttgctaatggacacattcattcaaagtagttttgagtgaacacattagtgcagttgtttgcaaagtatgatttggggtcccctggaagtctctgagatacttgcaagaaatgtgcaagtcaaaaagtattttcataatactgcaaaaatactatttgcctttttcatgctcatcctttctggaatgtacagtagaggccacatgatatgtgatatcacaatagattgaatgagaatctagctatcctctattaaggaagatattaaatagatttgcaaaaatataaaacactgccactcttctcacacattttaaaacatatagttttttaaaatcatacattaattttgctaacgtttaatgggtttattgtggctacttacattaatatttaaacatttttagcttaatttctgatacagtaaatctgatagatataatgatcataaatagaagctcttttgggtcctcaattatttttaagagcatctgggtaaaaagtttggtaattcctgtattagtgtatataaaatgaagtcccaataatatcaaacaaattatctatttctttatttgccagttgtattattttaaattgtgataatattaagcatgacaattgattccatttccttgattaaaagtgtattacaatagactcctgcttgtcttaaaaagaaagtgattgtctgttttgatttttttttttttttttggagatggagtctccctcttgtcgcccaggctgtagtgtagtggtgtgatctcggctcactgacacctccgcctcccgggttcaagtgattctcctgcctcagcctcccaagtagctgggattacaggcactggccaccatgcttggctaatttttgtatttttagtagagacagggttttgccatgttggccatgctggtcttgaactcctgacctcaggtgattcccccaccttagcctcccaaagtgctgggattacaggcataaaccacggtgcccggccttgattttgttgttattaaaacttaggaaaatgaaatatctcttctgccgtaccactatatttcaggattaccttttcttagattcttaatagttttaattctagtacatgactatcatttagttattgaaaatgattctaaatcttacataatggaaacataagctttctcagaggaataaccttaaaacaaaacagtaagaattgctttaatttcccagaatctacatgactctttactaggttagcatttatggatgggagtcttttcctaatatgaaactaacagggatataacacaagttatatgtattatatatcacattattataaataaaatgtgtttcaacaataggtcagaatttttaaaaatatttggaaaaaggctcagtaaaataaatgttaatgtccttcaagtataatataggtgcataatactaaataatcaagaagtaccatatattttttgtttgtttgtttttggtattactagtattttaattttaaacactctggtgggtgtaagtgatgacacattatttcatttgcaattcctttaccactgaagtaccatatatttttaattcagacaacactgtccctaaaaaataggtggtctctcagatatgcccttgagtgaaaattagggccattggattttcctgagttaagtgtgtaacttatatttgaaaaaagaatagcaacatgttaagtacatcatgagataactaagaggactagaggaattaagggctttgaataagtgaaaaaaatattaaaaatggagacgtttttacagtctagaaaacaaacaggaagaaatttaatattaaattaagaaatacggctgggcgcggtggctcacgcctgtaatcccagcactttgggaggccgaggcgggcggatcacaaggtcaggagatcgagaccatcttggctaacacggtgaaaccccgtctctactaaaaatacaaaaaattagccgggcgcggtggcgggcgcctgtagtcccagctactcgggaggctgaggcaggagaatggcgtgaacctgggaggtggagcttgcagtgagccgagattgcgccactgcaatccggcctgggctaaacagcgggactccgtctcaaaaaaaaaaaaaaaaaaaaaaagaaatactccaaaacaagccacaatggtagaaaatgcagatttgaatagattaagcattaagggtgaagaaacaaaaaacatcttttaacttgacacttcaaggtttaaaattcttcagtggcttcccactgtttttggacagtctatactcttgcatggcacgtgagatctttcacaatttggccccaaattcccattcccatgtaatcttaacttctttccgtgactttattgactttcctttcctcctactgccttatttttagtcatttccaaatacttacttttccagatctctttgtttttaatgtactttccccaaaatctggaatgcctatttcttctgccagaataaaccgttcaagacttggaaatggactaaagagaccactgggtgctatctagaagatcctgtggggactgttgattccataggtgtgtgcagagttgatcgactttctgtcaactagactattctatgatttcgtagtggtagaagttaagttgtagaaaactgatagcagtgcagatgattcttatctgtagcaatacaaatggttcctgttcatactaatgcaaatgaattttgtccagtagcggttataaatctctgtaagtcaaataaaatatttgacacgtgttcattttatatatgaatgagagcaatgttttcaactttttgaaaattattttttagtacatgccttttctaactaccacatataaaactcctatttaccctttgagatgtggtgaaaataccaccttctcagtgtggcattctctatttccccaagcaaaattagctttttcttcacagtgttcccattgtacttttagtctactttcgctactgtgtttatcaaattgttatctatctatctgtctgtctttctttctttctagttttcccactagactacatctttaaaagcagaaaactttttttttcatctttatatcacttcttcctttgccaagcatatagcacatgacttataaatgtttgcttggtaaatgtttattgatgaatgaaagtcgaagtcacagaaaagggtaatgggaatattttagcaattgttgataagggggaattggttacttagagcaaaaaacaaaatgatgttttcacttgtagactttatggaaaaatataatttagcatgaaattgaaaagagttgaaggaagaagcttaatgaagccagaatgacctaggagacatgtggattaagagagctgagaattagaggctcgcactatggctgttttcctgaactgctgcagtcaagacatttttcttctgtcatactttgtgcatttgtaatttaggggtaataatgattgtaattatccagacagaggaattccggtaatgggatgtttgagtctaaagtggacaggaggcagccttacttggctcattttgctatgagtgaggatgggagaaatttaaaataaatgtggcttgaaataaaattaaacagtggcatgaatcctcactgtgaatttgtaaaagtctttttcttggggattagcattacctccacttccttaccattttatttttattttatttatgtactttcaggaactagtttttggcaaaataggcagtcattagaatgaatagatagactggcttttgtcaggtattctgcacaattacatttaattgtgtttgggtaccttaagactcagatgtttttgcaaagatttggatgtttttttctgaagcgaagagtgatttccagtatttactccctaaataggtcacttacaaatagtagacttaaaaatcagcagtaaaatttgaatttatgccctggcaggtgagagaactcaaactgtttactaacacagttcactgctgtttccatggcaacagaggccagtttctgtcagtccagagtcgcttcgccagttgacttcagcagtgaatgctgtgtggtgttgccaaatgtctggcttctgtgtttcctgttccaagcaattgtttcttatcctgaatactaatgactagtctacaaaggctgtggttcagtaccactgaagacaggactgtgaatcatacgtagaaaactagtgagcgttttgcctgtagtgaatttaaaactatatgtaattggttacattctctaactagctatgccagtaatttattaataatattactttgctattattaggcagctgggcctaaataagaaatgacagcacagctgtcatcattgaatcaactgctttttcagaaaggcttgctgacttcggctggttatcaccatcatgtaaattcaaaagattgtgcacatgtatgccagcagaaaaataaaattgcaactggatttttttttttgcttttaaaaatgttcatatattgattgttctgagatggagaaaaagcagctgcctgagatgccagtgaaatggctgagaaatttaaaatgagagaaaaaaagtaaagcattcgaatacagaaaaaagctaagcagtttttgctatttaaaaaagaggagtactgtgatttttttaaagttctggttgtgtagtggttctcagtgtggagaactgggacactctctgcctggatcataccctatatcagacatttgagaaccagacttgttataattgtgtttctctctggagcataagttctttgagggtagactgttttcaccattgtatttctgacagctagcacagagcctggcacacattgagtgctcaataaatatttgatgaattaaatgaaactcagtgagtccctggcaaggagtttctggtatttaagcccgtcaaatttcctggaagaagtctattagactcttcccttcattaaagaggataatagatcattgctaagtatattatatggagcttcagttgacagttacgtatggctgtggcagctccaagactttgttttcagcagacaccactcaaaggtggctcttctcatcatttttttttttctagctagtggatccattaataatagcttttggtggcatcttttgccatttctaactcttggcttggccatcccctgcagaactttcactgtgaagaaggttgtcttcttcacagtgaaagttcccattagtaattttaggaaaacatttccagtgttcctttccttgtgccaaataccagccctggttctcaactggggaaaatttcatctgccccgcccctgcccaatttctcccactgggcatttggcaatatctggagtcatttttggttggcagagagtgctaccagcctctagtgggtagaggccaggaatactgtgaaccatcctacaatgcatgggagagcccccacaacaaagactgtttcagcacaaaatatccatggttaggaaattaagctcttttatgaaacttgctcaaaacccttcagaatcacaccctatgccttccttatctcctttttggaactgttccctctctccccacttaggcttagcttgttgtttttttttttttttaatactttaacaatttgatctctcttcctcagaatgtcaagatgttgtcatgaagagagagagagagacagactctcagtctttgctaccagtgtctgaacttatcggtacatagttatcttgccggtagccccacattccaggtggtggaaaagcaaatatgcgaatcaagttccagaaataatcaatcttgatgatcccattgcttttaagagagacatgcaaggaatgctctacaaatatagcacatggaatgtggaagctgctctataaataataaatattttgtattgttctacaactttttcataaatcaggaattttaagttgggtatttgtgtattacatgaaattctataaagcaaatgtgacttgacagtcttaataatatcattctaaggaagggcttttttttttctttgaaaactccaaattgatctaaatgatattgtaggtattttaaaacaagaagtgagcattttaatgcatgaatatggggctcaaattttgaattctaacatgaagaagataattgcacagcattggatagtcaggcttttctaagtcattaagaagggaatactgatcatcatttgttaatgatttcagtgacaaagaagggcgggaagcatttcacttttaaaactctttacaaatataaactaatgaatccttagaacctcttgtaagaaatgtattaggccaggtgaggtggttcatgcctgtaattccaacacttttggaggccgaggtgggcagatcacttgaggtcaggagttcgagaccagcctggacaacatggtgaaaccctgtctctactaaaaatacaaaaaatagccaggtgtggtggtgcacacctgcaaacccagctactcaggaggctgaggcaggagaatctcttgaacctaggaggcagaggttgcagtgagcagagattgcaccattggactccagcctgggagacagagcaagactctatctcaaaaaaacaaaaaaagaaaaaaaataagaaaggtattattgtctctcttaaaagatgtaaatacggtttaccatataatattctagtttagcaaattcatgaacagtgattatgggaagtgtttctgctctcaaatactataattaaactcttttcctggatgctttctttgtaaatagcataatatagtaatttctagtatttgcctttaggtgactagtcttgattcatcaagagaaaggaaatttggataataaatgtacaaaatatcttagtatgtctaggcctctataaaaaactaccatagactgggtagcttatacataacagaaatttatttctcacagtttagtagggtgggaaatccaaaatcaaggtacaggcaaattccacctctggtgcggtctcgtttcctagacaggcatctttttgctttaacctcacctgatgaaggaacaagggatctctctccagactctgttataagggcattaattcccatttatgaagaatctgccctcaagaccccacctctgaaaaagtatcatcactatggggcttaggatttcagcatatgaattttgggttgacatagacattcagaccatagcacagtgtaatgagatgacttaaatatatgttgccaaaaaccaagtctgtaatctcttttccttttaatttttatttaaagtttatttcgaaagtttgctttcatgaatattcacatacttaaagttgcaaaacaaggctttttttactgcttttattctgaaaaacaaaattccttattgtactctaatcactatttattgtaccactaaattggttcaaattttagacacatatcaagaagtttatatctcacaagtattctaataataggcaggcccttcaggtttcttttcttataaaaagaaatttagaggttacattagcaccaactattaatgtcagcttcaaggggaaaataaaagaagcaggaagctctctactttttctgtcctcatttttttccaaaccatttcccagctttcctacctggttctctacagagaactgaatcaaaaccactgttctcatgatctgctttaagtttttggaatttgagtacaaggaaaaagaagaacaaaaataatagaagacggttatgaaatggtaaaagttgtatttgggccagtcaccaagaattcaggagcaaatatccactgactgtctgaattaattctgatcacacactaatggcaaaataaaagataggcaaccaatattaagtgtctactatatgcctggcactgagatgctgtgagagacagtctctgccttcatggagcttccagagcaggagacaagtggagcagttgttagttcaagtgcttgtggcattgtctgcaaagagtgaaggcatcatcaggaactggcttcagtggtttcctgaagctcagcactctagccttcctgatggctagaggagggtcacaggggtggttaatatgagagtagctttgtttatttaaaaataatagaaacttcagacctatttattgtattattgagtatcattcttatatatatttttaatgtttattagtatcttttttatgtcaggatttggggaggaattcaataattaatattgtcatagcccctcatctggaaatgtctacaaactattggggaacaaaaacaagaaaataggaaattgtaatagagtgtgatgaatattcggctgggtaatctggattgctgtggaggtacatagagaggaccacagggagttagcagagactagagagtaatggacatccaagagtcttacagaaaacatggaatccagcaggtcaaatcaggtaagtggagcagcacgtcaggcagataggaccacacagacaaaggctctaatgcaaatggaaacacacagaagcacaagcgttcaaagagactgtgggataagaggagtggaggtgaggagatgtcagccatgaacctggagaaataagcaggggccagtcatgagagatcttctatgccatcttaggaaacttaggatttatctagacacaaagaaggagccagtgtaaaggttaccagagggaaatgatgtgaccagatttatgtttgacatcgatcactcttgctgagatatagggaaaaaattagagtaaagagtagagataagaaaaatcgtccgggtaataacattgaatactgtatacagagccaattataggaaaacaattctcattagtgatcatttttattgtaaaattatttaagtgggtacagacataaaactctatataggctgggtgcagtggcccatgcctgtagtcccagcactttgggaggccgaggtgggtggatcacgaggtcaggagttcgagaccagcctggccaacatggtgaaaccgcgtctctactaataatacaaaaagtagccgaccttggtggtgggcaccagtaatcccagcagctactcgggaggctgaggcaggagaatcgcttgaatccgggaggcaggggttgcagtgagctgagattgcaccactgcactccagcctgggcaacagaacgagactctgtctaaaacaaaaacaaaaacaaacaaacaaacaaaaactctatataacatctttatgcttatagtttttatgtaactataaaaccaacggattgacaaattaccaaccagatttaaaaataataaaattcaaattaacaacattcaattaatatgaaagatggtgtgagtttcttgaaaatacatccctgattttaagtgtcagtggttcttagagggtggtcctgaccagcagtactagcctcaccgaggaatttgttagaaatgctaattttcaggccccaccccagacctaccagtcagaacctctgagggcaggccaggcagtccccgtctaacccttccagaggattctgatgcacacgaagtttgataaccactgcgtagcaagtgaacagatggatctcctccaatacgaagaatacaagacattaatttttctgaaagcagaaggtcctaggaatagaatttacaaaaattgttttaaggaatcatgagaaatgcacatttagcatcatcagatgcataaaatataagaaattctcatcattaactatgattaaattaaatagtagataggaactattaataattctaactctaaggagaattttactatgcttttcttctttttagagtggattagattccttgtcttacccagtctgtggcatgagttttatcatgccacttaaatcattcagggcaaagaacattatatttacattccagttctatgtttgccagtcaatactgttttatgctttttcctatatacatatttttaaaaacatttcacctaacagaaaaattcctacttctatctgctggttccattttatcagaagggtgaaatattttttcatgtcccaccatcatagaagttttccatttgtctgtcaggggttgataagcctggtgcaggaccacccaggattggttcctttcatctcctgggtgctccctcagaagggagcttctgttcttccctaccacttctgaagcctcagcccttcctccttttttgttagtcactgctgaattttctcctgtttcccacaaatccagtcttaaccagtctttaggaacaagaaaaaacaaaacaaaaaaaagtttgcattgcacccaaatctttctttttctttttttttttttttgagaccaagtcttactctgtcactcaggctggagtgcagtggcacaatctcagctcactggaacctccgcctcccgggttcaagcgattctcctgcctcagcctcccgagtagctgggattacagatgcccaccaccaagcctggctaatttttatattttcagtaaagacagggtttcaccatgttggccaggtcggactcaaactcctgacctcaggtgatctgcttgctttggcctcccaaagtgctgggattacaggcatgagccactgtgcccggcctctgctaggttctttgagtctttgttttgttttccgctttgagcagggtagggaaaaaaatagcccttgggatattagtaagagagaaaagaggatgggaaatatagagaatatatatatatataaaatatatatatataaaatatatataaatttatatattatatattcatatataaagacatatatgaaactagaagatatcataataaaagctataacatatttttgtgaaccatgtttttatttcttttgtatcatagtagacagtacacattggagctgcagttatttttctaaaatatttattcagcagataatctttaagcatttattatgtgctaggaactgctttagatattgatgagatagcagtgaacacagaacaaaaacccctgccttcatgaaggttataatgtagggaagggacgctgacaaaaaaattacatccataaaatgtagagcaagttagatggtgataaaattctacgcaggaaaataaagctgggaaggaggttaaggagtagggaggagaatacaagtttaaatgggtggtcaaggagggcttcactgaaaaggggacatttgagtatacccctgaggaggtgagggagcaagtaaaatagagatctgggagagcatcctccaggcagagggcgtggggcccgagggggttaaacaacaaacaccgtgttgttttgttccttcataacatggaagtgaaagtcgggggatgtgagtgtcgggctgtgtcctaacacgtaattaaaccgctttggatggcgttgacattttcaaatctgattttatgctgtattttggcaggtgcagagcaggctttgatgtaggccttatttagctgtaccatgcgagtgatacccttctgaggcctctagcaagttccctgtatcaccggtttttccgttttggctggtgagatgacaaactctatctagcctggtttgagctctgtgaattgcttcaggaggttctttccaaagccttgtggggtttcaaaccaggcctgtgctgatcagtactcagccaaagcctcgaagaggtttctatccaggtttccggagctctttctcttcaggctgtctcctttctcgtattctgccctgtgaattctggccacctcagcctccctggtctctcctctcctcaccttgctgaagccatgagaccactgagctttgttaggcttttcctatcctagtgctttagagctgcctccaggcaacagtttggagaaagtataaagaaaatttgttttcattctttcaaacaacacaattttgctctggctatttttcaatgtcagaaaatacttattcttgaagttttcttttttttttttctttttcacagtaggagggcaattctctgggctgttaatccctcatgggtagaaacagaggttctagtagaacttttgattgccaaactaataaaaagcctttcacaacttaacctatttgtatttatatgtaaactctggcccacacttagaaacctgtataccatggaagcaaaaattctgcccatgagtttcaagttgggttatctcaaagtaaacctaggggcaaggattcaagtgcagagcaattcatttgggaggtgatcccaggaaacatggatggaagagtagggaagtgagagagggaaaggaaagaagacactaaagggcatattatcgactcactcaccagctatagcccagggcccagtcctgccaaggaactctgggggctcctatacagcacacctcggagctaatcacattgatgaggaaagaagccgggtgtatgtccgtggacacatcagccagcatttgctgagttgcttctgtgggtgttaactccgcacttctgggttgtcctgcatgctggttatacatgttccctgtggtcagagaaaagtcctcaggcagagcggtgtagtttggatatttgtctcctcggaatcccatgttgaaatgtagtcctcagtgttggaggtggggcctggtgggaggtgtttagatagaggcggatttctcctgaatggattagcaccatcctcttggtgctgtcctcttgatagtgagtgagttgttttgagatctggtcatttaaaagcgtgtggcacctcccctgcactctgttgctcccactcctgccatgtgaaacgcctgctccccctttgccctccactatgattgtaaacttcctgaggcctccccagaagcagaagccagtgctatgctccctgtacaagctgcagaaccatgagccaaccaaacctcttttcttataaattacccagtcttaggtatttccatatagcaatgcaagaatggcctaacacacagagattctcagatgttgacagtaagcagccttcctagtgcagaggtgaaagccaagggggtataagcagggttactagtattgttgccacatcagacatgggatgcaagttaaaccctttctaaagaagtgctctgtgctccgatttcaacccagcagactaagtagacctgatcaaatagatacaggcttaagtcagtcttctcttccttttcataattattagaggacattctttaaattatttcttcaaagtactgtgaatacctaagctacctggaactcacaaggaattaataattctatacatttgatattttcctgtacctcaaagtttgaaattctaggggacattttggaacattaatttttttatacaaatacatccacacttttattgccttcttaaatagagtatgtaaaataaatgttagattgttctgaagactcagtgaattttatttaatgtgatatgtttaaactatagacatagttgtatttgtagatgtggagagaaaaacatttaggttagatgagtgctctgctagcagcgttcctgacaaaacatcttatggtgacttagttttatgcatttgtacctttctcataagaggaggggtgtagcctgatggcctggacacggaaacaataatgagttatgcaaaaatagttatgagaccagagaccaccaccgctttctctgaagtggtttaattggccctcccatactcaatatcatctccttggccaaagctgtcctcaccctttgacttgtaggcacttttcaaaacacatctattatttcttgttgtttgttttgttttagaaacagagtctccctctgtttttcaggctggagggcagtggtgcgatcatagctactgcaacttcaaactcctggactcaaacaatactctctctgccttctgagtagttaggactacaggcagacaccatcacgcccagttaattttttatttttattttttgtagagacagggtcttgctatgttgcccaggcttgtctcaaactcctgacgtcaagctgtcctcccacctcggtctcccaaaatgttgggattaaagggtgcgcagcccacagctattagttctataccacggatacagttgataccaggaatttcctcattcacttacccaaatgttttttcttcctacacattgttgacagaaggaaatgatgaggattgtgcttcatcatcttaagaatttgtgctagagatatggagagaagtattatattttcttaatagccattgagatcaatacattatatttttctggacttcactcagttgcacacatttctagatgttcctcttaactttttataggaaatagaataccagatactatttttaaaaagtattcttactctaataattagacaaatattgaaaaccttgcagtgttcttgataaattggtgaacttcctataaatactcttcagaatcagcaatactataaaatctaagtaagtttctgtctccatgggctcaattagtgaaataaaactggctcagaaagatatgagaaaaagtccaatgtaatggtcctttttcttgagggaatcattgtgattgcctgaaattgccttccactttaagtacaaaaatttataaaattatccaggaaaagttatatgcctattcacaaattagtttacacttgactcccaaatattgtattttataggaatttatagcattagcacttgcaaaatgagtcattttttccttaacctcttttaatcaaagggcatttagttccttagaatcccttcagtttggaagttagcaaataccaatgcaatataaattatttagaagaatgacagtgcttagaaatgaattatctaaaaaattagaaatttatactacggtataaatgtaaatctacattttttcatcagtagcatctagttttttactgccatgtctcattttgaaatgccaaagctatatgcatttctttaaaaaaatgtgtatagctccattgactactttgcttaaataaaaccttgtactttttctgtaaccactagaccagagttggggcatgcttgggccttttcactaagaagcatttatcagaacattgtatagttgccttagggtaggctgatgtgatgtgtagcacatctatctggcattggccgactcgggacctgtaaaagatttcaacagctgctcttctgaagtgctgtactggtattacacaaggtagattatcaagctagattgaattccataagagtagaggttatgtttcttttgcttatttatccccagtgctgaatatggtgctaatgatcaataaatatttagtgaacagatgacttaatttgttcagaagttttctgatgtttttgctatcatgcacaggtgaagtctgacccagttctcccgctgtctggttatctactcacttgattagacttctagtggtcttgtctatagttgcacttaccatgctgtattatagctttcctatttacaagttttcagtcaccaccagactgagtgttccttgagaatgttgaccctgccttatatattcttgcatcataaaagtctaaaacaatggtttacataatgtctggtagctttttagcaagctagtctcaacattttaaagacatatgcaagtatctgcttccttttacatactagtttttcactagaggaagataagtctatggccagaggtaagcttagatttaaaaatgaaaggaaaaaggtcaactttataaggctgctacatctaatatagtaaatggtggcttcatttattcatcaattcatgttttcaaccagtatttattgagtgctgagtgccagccaggagtcaagcatcattctaagtactgacaaagtcacaacaaataaaagagacccaaaaccctgtgtttatgtattttaaattctaatgagggaaatatgtaataattaagataaataagtaaaacacctagtttattacataatgataaagagctaagaagaatgaatacagcagggagaggggatacagataactgggagagcagattggctttttgatagattggccgttgccagtattaccaagtaggtaattttgagtaaagacctgaagaaagagaggttgccatctatgtggacatctggaacagcattcctggaagaaggaagaacatgctgaatccagtagtcagatctcagttctcaaattacttgtccttcttagcagctcttgtcacagtagatcactctgctaccacagggccactttccagctttcctcttcttttgctgatagctccttcactggtttctccttttcttgatttccaaatgttggagaattctagagctcagccatcataattcttttcttctcactctcctccctgttcagctcatcctatcctgtggccaaacacacttaaatctgtatttccaaccttggcttctctgaaatctagatctgtatatccaattgctcacttaacatttcatctacacagtcaaatactcatctcaaatttaatacgtccaaaatcaattcttagcctcactaccaacaaatgcttcaccttatttttctccacctcaggaaatgacatcattattcacatagttgctcaagctaaaacttagaattgctccacgagcccttttctgctcttccatcccacagaacacccattggcaagtcctgttgggtctaacttcaaaatatttacctcaaatgagtatttctacttctacagctactttactactccaaaccatcaccatctttttctaagaatataaaactaaagaccaatagatataatagatatagcactattatatattataattataaaatgcattataacatacatataatattaatatatttttggaatataacaacataatatattattatataacataatgctatgtatgtgatttatataattataaatatagaaacataatttatcatatattaacatatcccatactatataatgctataactgaaaatatttatgcatattaacataaatatagaaactgtctcctaatttcctccctgcttaactgttgctctctgcctcttcattttccatacagcatctagaatggtcttttaaaaataaaaatctgatcatataatttttctgctcaaaactcttccctgattttgcatccttcagaagcaaacccagcctccttaccatgtccaacaaaaccctatataatctagcccctggctaccttttctgcctcatctcaagacataaccttccctggcactttgcacactcatccgagcatctcctgcctcagggccttttctctaggtgttctttctgccttggatatcctaaacgctccttcactttatccatgtctctgcctaaatgtcacataaagcagaggccatatctgactactctatctaaatataattctgtaccagtgtatagtcccttgttctatttcatctttcttgatagccttcatcaccacctgaaagtatagtgtttatttattttattctttgtttatctttctgttgcctatttagggcaaggtcttttttttttttttacttttatttttcactgctatattcatcctgtttcttagaatggtgcctggcacatatcaagttcttgataattatttgtagaatgaatgattcaagatctctcttttgaatttccataccctcctatttaaaaacctatcatagcacttaaaattgtatctaatgagaagttatttttctgactcatgtgactatgagcctctggaggagaaagactttaacattaatctctgattttccagtgctcataaaagacttgggtacacagggttttttcctaaaatgacacttattgaattaacaattacttggactcatccctccctaaagaagcaattcaaggaacctctggtgtttccccaatgcattaagctagttagagatactgggcatcatgatcatcaactaccttgtcctggatacaatacagcccatctctggtttagaaaatagttgagtgacattcaggaagcatctgaaattttagatcatggtttttatagctaaaaaaatgctaagagtttaagataacattagagcatcttagatttcatagagttcaacattagtgatcactctggggactgttgtggggtggggggagggaggagggatagctttaggagatatacctaatgctaaatgacgagttaatgggtgcagcacaccagcatggcacatgtatacatatgtaactaacctgcacattgtgcacatgtaccctaaaacttaaagtataataataataaaattaaaaaaaaacaaaaaacattagtgatcatctagtcaaatgtcttattttacccatggtgaagctgaggtccagagaggtggtgctattttcgcaggtgataacgaagtcagaactagcgttagttagactgattgcagtctgattctttctccaccataccattttccatatgttactcaatttatttgatcttggtcatcacctctccagtggtaacctcagaagactgtatctaggtaacgtcttaattctactctgttttcacatatagattttctttccatatatttagaagccttgatggtccaagtcagtaagtcacacttttatgacaagaatattaacagtgaagaaacattagatcagacttttagacaaattctaagctgtatctttactccagataccaccaacattattgaacattatcctaacttgaattatttctggtagtgattgggttttctagtagcgatttaaatagacttatgtagtagtgtgtaatctatggattattgggagtaattttaatgtaagcattttaacaatgaaagttgcatgatgcttagaacatatagggacaataaaagtcacaactctcttgagatttttagaacgcctgatgctttgaaatgtgtgttaaagcattactcatgactatttctttcctaaaacgatggcagctgtgttttcctatcttgtgatgaatattcttaagatcaccatacagaaaagagcaagaatgtatttagagcacatgtcaagtttatatggtgcagttttggcaaaagtaaaacaaagaacaaaaactttgtgagtagattctttgatagaaatagttcataattaatatgtacttagaaaactgaaaactagaatcacctccaatagaattacagtgtttttatttaacaatgacaagcagatacaacatatttaaaaggtttttgtgggttgtttataaaggtaaaatgctagatttattggtctatgatcgtagaaaatggattttgttattttaagccttttttcatgatcctctttccttacccggctgggtaaatgttcctcctttttccacttataacacctcaagcaaatcattctgttttcctcattgaactgaaatggcatgtttatactctggtttttcttgaatgcagcttaaagtcccttaaggcagagagatctgatattcaattcctgttaacggtgccagcattttcccaaacaggctcaaacatgctctctacctaccagttttcaaaatccctttggttcagccttaaacttctcttctgtgaggcttgactgacactgagaagcatcatcaacaaactaacagggttattcagactgaggctactattaggtggggagatggatgtgttcaagctccagagatgatgacaaccttccccctctcctcattcctgaagtacttgaggattgcacactgccctcattttgcacagtcttgtgattaaaggcaggagctctggagtcaggctgctccgagtggatctctgctctgccatttactaactctgccccttttagctctttaaccttggacaagtttcctcacttctctctgcctcagtttcctcatctgtaaaatgaggataataacagaacctatatcatctggttgctataaggatgagattaaatgagttaataatataaagtgcttagaacagtgcctggcacagagcaagtgctacacatgttatttgtaattattattattatcattactattcagtaacgctggttctctgggtagtgatgggagagagaaataacagaatctctatgagaataacgtggtagtttctaaaagattgcctccccaaagcctttgttcagggacactgctctaggctagaaatccaatgatgtcccaggttttagatccaaagaataagaagctatccagtgataatctattgctctgtaggccaaggattgcaaatagtttatttgatttattggtttacacatttctttaaaaatacatgtaactgtgatgtttaattttctgtgtcaacttaattaggctaagggatgcccagatagctagtaaaatgctatttctgagtatgtctgtgagggtgtttctggaagaaattggcatttgaattggtggaccaagtaaagagtattgccctcactaatgtgggtgggagtcatccaatctgttgagggcctgattggaacacaaatgcagaagaaggcggaatttgtttctgtttgagctcggatatccatcctcttctgccctcagacattggagctcctggttatccagtttttggagttggattgggactcataccattggcttccctggttctcagacctctgggcttgggctgaattataccactggttttgcagaaggcagatcatgggactttttggctttcataaattgtgtgagccaattcctataataaatctctttgtatatatatcctgttgattctgtttctctggagagtgctgattaatacggtaactatatagatgttaggcttctttaaaattcatgaatgaaatgacactacactcatataattgctctgttcagataggtaaatctatctgagttgtacgtaaagaactagaaagacatcttagaagtgtttttagaggccaggcacggtggctcacacctgtaatcccagcactttgggaggtcgaggcgggtggatcacgaggtcaagagttggagaactgcctgaccaacatggtgaaaccccgtctctactaaaaatacaaaaattagctgggcatggtggtgtgcacctgtaatcccagctactcagtgggctgaggcagagaattgcttgaacccgggaggcagaggttgcagtgagccgagatcacaccactggactccagcctgggcaacacagcaagactccatctcaaaaaaaaaaaagtgtcatttagaatacataaattttgctgaagaatggtctttaaaggtaagattccatgattttggttaaaattagcacattactggtctactctactgcatttattcccaccttccaccttaaatataaaaacaggaaaatatgaaaagccacaacaggaacaaaaatgaggattgcttatttacttctgctagattacaaggatttttcattcattgaaaggccatgtaaataagactgcaaaaggcaatggatagtcctcatggacaaaaataaaaatcctgcttttctgagagtagctatgaagactttttattcttttcttactccaagcccttgacagaattaaagatctatacctactcacaagggattcataatcctcctactgcatatgtactgcatgtttaggcactcaaatgctgttacccaactcttaccagaacagtgttttctatatccatgaaaaggctgactctctgtcgagacagaatcagtgatgacaacagcaacaataattctgataacaatcattagcatcatcattaatatttactgggttcttgtgcaagctgctgttcaaaggacttttcactttagatcttgtttataataaacataataacctatgaggccggtagtattattcctttcctacagacaaggaaactgaggcacagagctctgtggaagaagtatttccaaaatacagagagaaaggacaatgaaatgatgacatcgaagctgatagctatgaaaatcagggaacataactccaaccaaccatagaatggaagtcgttcagaggaataaatgaaaataactgaagtgaatcaattttcccaggcaaggaatggaccgagcatgcgcagctctctgctaaggaagtagaggcagcagaatggagcctctagagtcaggcttgccagaatgcaagttcttcctctaccacagctttgtgttcttgggcaaattacttaactcttttaagccttagtttttttatttgtaaaatggagataataatagcatgttcctcatatagtttttgtgaggattcagtgagtattgcattacatgtaaaagggtatataaaactgtctgatacatagtaaatgctcaataaataatagctattattattaaattgttgaaaagagaaaggaggaggattcatgctcaaataatttgtgaggtgctgattaattgggtttctttattatgcggcttctcataacctttaatatgctaacctagattgtaaaacttcaagaacattctcaggtttatttgacttgaaaaccccccttttcccacatggagcacagataacatctcatgggacactggtgttctacagatcacagtgtaggaaatattctttatttcacacactttatatacaagaatagaaaaacagacatgaaaatgtcttacattgataacctgcactacaagcaaccatcaaagggctatttagctttacaaagcatcatgaatacacttctttctccattttataaaaccatgtatccaggcagtcaaacctgatgaacactcccttttgtcagcatcatcacctggaacactgaaagtgttctcagcactttacccaaatgctgtaaaaaataagttaaaattggcacagctccagccttctgggaaatttactttaccagattataaatccttcaaagtgttttcggttcattgtgtcttatcatgtcgtaaggacactgttctcttgtgtgttgaaattgcatttctcctacgtgccctattttggtattggagtgctgttgaattaacattaaaagaacacactatttagaagttttgtgtctctgctgcccagcactgctggtagattatattgatcagctttgttttatttaatcttctggtgtcaaatgacatattctacatggttttccagatgagttttgttttattcagtcttctcatgttgaatgacatattctacatggctttccagaactgggccagggcttattcagagagagggtaattagcttctataggaattatacccattatacgccattactggtaagctgggttaaggaaatataattagaaataaaactcctgctaaaccagtgaatcctttttataaaaatgtagaaaagaacaaaatagtgtttttattgaataagcattaaatcagactgtgacacacattacagatgatctgctaaggagatgaaaaagagggaatgaaatctcacccttttatacagccaagcagatacaacctattacatgcatgttcattgtctttatcaaaatataaaataaaacctcttgtgtcttaatgataagcaggaaattacatcacggagcatgtgcctagactttgattccatagacatagggaaacaaggggacttccatcctcttggatgttcccatttcaaagaaatgcctctgaagcctcaggaaatacattcctaggatgtagaactagcaagaggcttagtaagctttcaaaaaagatttataaacacctcagagagacagataaagcatttaaaacttcaagtgtcctaagggcgggcagggagaatactctttcccctcttggtgccagggaaaattttaaattatatgtttgttttcctccaaaatctgtatttacctttacaagtttccttttctgttactattttatagttgcagtataattttttaaatgatctccattggcgtttctactttttctggctagtttgcagttgactaaatatccagcaagtccataatacagttatgaaacaagcaattatcagaattacaataggatgaattaaaaaattaaacacaatatttgcctgtgggaataacctttaatatcataacaatggtataagtctccattagaattctgaattcttgattagccatgcataaacattgtccattacacattaaattcacaaaacattgtggagatttctgcttgtgcattcaaatgattcactatttgaatattgttttgtagtttcttatgaaatcttagcctatataagcctgagcaacagcttatctctataatcagatcatctaaatttttaattaagagtttttcttgaaaggccaataaatttctcctgagttcttgtctgtcacataaataatgtagcatttacattttaatctagtcccttcgataattattccatcttcttaaatttttcccagttgtgaaacacaaagatagccatggcctttatctaatataaaagtcttattaaaagtcatccattaaaagttacagattgaaattccagtgtttgatttgcagtgggttgtcttaaggacaaacccaaactatgagccattttttttttgcatcagtccaatcaatagttgtattattataaaagtcaattaagtctccatgaataatagacatctacctttgtttactgtcaatcccgagactaggaaaaacttgtgttctgggcaaatgggacattccttgaaagactatgtgctcttcctcaaggagccaacattccagtgggatttcctttccctttagcttattgtctcaaacaccagctcaacaagcttcattcctgttcaaagtgtggtctgtgaaccacattttcagaagcaaaacttaaggacactgctcttctaagaatttattttattattttattttattttattttattttattttattttttattttgagggggtcttgctctgtcacccagtctagagtgcagtgaacgtgatcttggctcactgcaacctctgcctcctgggtacaaactcttctccagcctcagtctcccaagtaggtggcattacaggtgtgcaccaccacacccagctaatttttttgtagttttagtagagatgaggtttcaccatgttggcctggctggtctcaaactcctaacctgaggtgatctgcctgcctcctaaagtgctgggattacaggcctaagccaccatgcctggtcctctgagactttagaaactgggttatgggatattggtattaagataaacacagcatggttgtggttagttgcaaataacagaaactgacattttatttatttatttatatttttgcttttcaacttctattttagattcaggggattcatgtgcaggtttgtcacagggtatattgtatatgctgaggtttggggtatgaatgaaactgttacccaggtagtgagcattgtaccctataggtggttttccaacccttgcctcccttttcctccttcccccagtagtcccaagtgtcttttgttcccatctttatgtccatgtgtatccaatgtttagttcccacttgtaagtgagaacataaggtatttggttttctgtttctgtgttaattcacttaggatagtggcctctggttgcatctatgttgctgcaaaggacacgattttgttcttttttttatggcttcatagtattccatggtgtatatgtgccacattttctttagccagtccactattgatgggcacctaggttgattctatgtctttgctattgtgaatattactgcaacaaacatgagtgtatgtgtctttttggtagaacgatttattttccactgggtatatacccagtaatcccattaaatggtagttctatctttagttttttgagaaatctccaagctgctgtccacactggctgaactaatttacattccctccaacagggtataagagttcccttttcttcgcagccttgccagcatctgttatttcttgggtttttaataatggctattctgactggcatgagatagtatcttattgtggttttgatttgcatttctctgatgattagtgatgtggagcatttttttcttatgtttgttggcctcttgtatgtcttctctggagaagtctctgttcatgtcctttgcccactttttcatggggttatttgttttttgcttgttagtttgtttaaattctttagagattctggacctttgtcaaatgcatagtctgtgaattttctcctattttgtaagttgtctgtttactctattgatagtttcttttgctctgcttctgcagatctttaattaggtcccacttgtcaatttttgtttttgttgcaatgcttttgaggacttagccacaaattgtttgctaaggctgatgtcaagaaaggtatttcctaggttttcttctagggtttttatagtttgaaatcttacatttaagtctttaatccattttgagttaattttttaatttaaggaataaagagatttgttggaagagcatatgatggctcacagagctgcaggagcactggagatccagggttggaagatgggcgggaaacaacgtagtcagagaagctcacagcctgatttccacttgcggggagtgtggctagaatgctggagtgaggaattttctgcttccttgattctgctaatttgccccttcactcattatcctttcaggaatcgaaattccaattgggagtgtttggttagttgagccccccctagtaatgtcagcttcattgcagcaagagagcaaagggagagaaacagctgtcccactttgtttctgaagtaaaagacagtactctgtcttcaactattctggtgtttctgtcaaatggtactcactctgggcacacactgctctaccatatgctttgcatatattaactcatttatttttacaacagctctatgtggcagatattattcttcctgtttgtaccataaagaaactgggcactgaaagttaatttaattgccccacatcacacagtaagtggtagaaatagaatctgaagctaggctttcaggctacaggatgtgcgtacttctctatctgctcaaccttgactaagataagtgatcagaggcttagaagataaaaaagaaaagaaaacaagatatcaaagagaaaacaacaaatcaataagacggccatcaaatgtgtgttttgtataatgataaactgtgcacatttctgtttttctccatatactataaatttatgtactttcaaaacttaattttgtcataatattagacttacataaaatttacaaagataatatgaacagttcccatacatggtcttcacccagcttccccaaaggttaacactttacataaccatgaaaagccaaaaaaaagaaatgaacattgagacattactattaacaaatgatgaactttaacatatttccccagttttcccaccaatgtcctctctctctttcaagatttgatccagaatcccacattgtgtttacttaccatgtccttaatcccctccaatctgtgataaatcctttgtctttctttgtctcttgtgacttttaacatttgttcaggtagtttgtaaatcatccttccatttggacttgtcttaatgttttcttatgattgattgaggttatgaatttgggggaaggactttttcctgtgtattctatcagggagtacataacattgatatgtcatattactagtgatgttaacattgatcactcagttaaggtgactatatgtttattttttagtaatttatttttagtttttaaaaaattgctaggttaatgcttctgtttgaaacttcagttgatttaacacttccaatatttagtaaattttattcattttttttactagcgggttttgctgtatttcagaaccttcaactcatatagatccctgaactagacataactccttttgcctttcagtcacttactgtgattcagaacatatttccttaaactacacataactaacgttccctgtgatgtataataagctaagtggaagatgattgctccactatgttcatattttggagtagactccatagccaaaggcaatccttattctaatacaaaatgtactaggacactagggagttagtgaattagaataaattctgtctacttgatgggtatccaggccatttcttttgttgtttttgaaagctacatttgttagtaagaacttcagaccaatttggctattagcctaggttttatgtgaaacaatcttggatatttaagattgtacgtctgtcttttgatatgagtaaaacatgccaaaatagtgatgtagacaaagtattgttatagaaaaccctttagcaattgtccctgtgtaagcccatcctcttttgtatgttttacttataactgaggtacatatttaaaaacatcatgatgttatactttgtgatatatatctaaaatttctccttaattttttgcatccttaggagtagtattccatgtttgtgtgtgcttgttttttctttgaaataaatggtaacatctactccaagccttcaacagatagcatagattgttaatgtttggtaaaccgtttgttaacaaaattaaatttagatggttgatagtggagatgtggctaaaggtaggaaaataatacaattacatactcataataagccaatgtttgatgtgccaccatcctggcaatgcttttagatttatcaactagaaacaagtaacactggttattaagcatcttactctgtgtaactttgcttgcaaatataacttaacacttaaaaaaagttactgtctgcttaaccatctagtcacataagcattagtttttatctcaatacttaggcactttaaaaagtaatccaagcatcaaatttaagcttgttatattagcttttaaattattttattagattatcactgctaagagctaacatggaacactggagccctggattttaattttaacattaatatattagaaatcataaaaataaaaagaactcagtttctttcccaggatatgccacagatgatgtctataaacccttatttcctttttcttccccccagtgggtaatagggaagtaggagagaagccattaggcagcagggagcaaaaggcaaaattaaatgcttttgtagacactttttgcactttttgcttcaaccagggagtcggaggttgctgtgagccaagattgcaccactgcactccagcctggcgacagagccagactttgtctaaaaaaaaaaaaaagatggtcacaattggtgctagagagctggtatgagcaggatccaacatatttctggttggagaggagagagaagaggctcagagacaagtaagaggacactcttcacacagggaagagatgatatggtctcaactctattggtgagatgtgagcaacttccagagatgttgaagttatggataaagaagcagtttatagcaatggttaagggttaagactatacatagactcatagacagactttgggtccaaatcctggtgctgcaacttaactagcattgtgatgcagggctgtttattagcctttctgggcttcagtatctcttttctaaattggtgataatgatagaaccagacaatgatagaaccagataatgatagaaccagacactcagcattgttatgaggaataaaggagtcaatacacatgaagtgcttcaatcagtaaaaaccactgtacatgttatctttagccatgcagaggagatactgataattaatgattaacgtgttgatgggtgggcaaggaaggagaaagaggagtcaaggttgacttgtgattttttagactgtccaaacaggtagctagaaatgtatctaattttgataatcttcccagtgactgcttatctatctttgcactgttctgtcagaagcaagcaagcatgtatcttttttttaaacattgggttctctttgttacagcagcttaaactacagatatggcgggctagtacagatggattctattttctctgtgagtgatgagatggaagggttttctgagaaatgaaagttagtaggaaagggcataaggtttgaaaagagtgaaattaatttgaaacagctagtggtcaggggccatgagagtaaagataggtactaggaaaatatagacacattgtgtgataatcttgaggaagtagaagagcactgattcatggagaaaggaaacaatataaatatgaattaaatataaacccaacaaaatagaaacaaaaaactaacaatataggacacaaaatttctgctggaaatatttacagttttcagagttagtgttaaaaatgtttcagcacagtgaagatcaaaagtatgttttcaatgttacaatacttattaaacaacttgtggattctagtattaatataagaatttacaaagtttagggagacatggctgctattcatgtacagccttatagatttgtatgactttaaagaagtaaaataggcattgactgccagcaatatttaaataccaaatcaaatataaataaagtgctagaaacattgagattaaataagatggaacaatgttttagccttatcatgggaagcttcctgaaagaggtggttttttaactaaaactcaaaatggatatatttttacactttggaaactagaacacatattattggttgtatgcttctattttcatacatattttctagtggtagtaggttggagcaaaagtaattgtgtgttttttttggccatgaaaagtagtagcaaaaaccacaattatgtttgcaccaaactaataaaatcatatttgactttaggatctttaggctggggcagatgtaacactacactcatttttcataggctggtgaaattttctctgatatttgctgtcttttgggtcttctacgttgataaaatatgattttatgttaatattcctggtatgagccatgtagaattaagtatttggggtcattcgctagaagtggactacatcatttccttatcacaattttcactttaatctgaaaaattatataggttattttgagttgagatcttctttacattgtagcaaggaaacatctagtgaccttgcattttacacaacattagctacaatcttatttcctaaatagatgttgagataatgtttttcacatttttgcttatttattaggcagtataaaatataattggaagaattcttttaagagcccatcatgatcagaattgcatatttatcctgtgaataaattgttacacatttaatgactgcacaaagtcattgtcacaggtttaattttctttattttaatcaagatcctttattttggtagtgacaacagtttattcatcctggtgaatggggttctgaagatgagtaagtgtgcttgtatatgtaaagccttagagaggctttgttttcactgggaaaatattttaatttgggagtcagagccctaagccaaattccttcttatcttccatttaattgagaaaattgcttaatctcagtctttctgtcaagtttgattgacaggtaactgttggctgtgaggtgactgtaattatgagtaccttaaaatatcttgagactgcttgaagagaggtgatatgtgtgtaacagggacagaaattattaatgtgtgaggagacaggttttcctctgttcctctgcctaatcagtttaccatgcagattggcatcatctttagaggctgaacaatagaattaaggatggataaatgcatggagattttgtcttgagaaaaaaagagaatagcagaggatataaagcaagagggaaaagaaagtaaagtcccgtcaagagaaaagcaagataggaaaggaggtttaggggagaggggtgaaagtgagaggcgagaaagctgaggtgtggggaaaattggcaatcaattggaataggaaaaaaaaagattatacattagatctcttttaacattttccaagagatgcacctaggaattagaattactttaaattacttctggttgctgaattttatttctttgtctatatcactttgaaccagatatttggatttcctggaaaaaaactcacacaaatgataaattagctccttattctgaaatactttagaataatgttgtatcaaaatccagtatggtaaaggtaaaagtattttcatatgacattaatatcttattactcagaaagtctaatttatatgacaatcttgggagatattaatagatttatctccagctaaaactcagattattataacttaaacattttcagcttaagacaaattcagttttatgaagactagtgttttccccttacttttctaacttataattattgtgaaatgtattttaccctttaatagctaaatcaataaaatccattttaagtgaactatttttcaaacaagaattttcatagtattgattcaagataagaatatcacattttgataaaaatcagtgaaactagtagctctctaaatgctgacttttctaatttgaaacttagagattcatcatgcttagaatgctaaagttttctaatgttcttctctttaatatgtaagacacaaagcctcttgaacataaattgcaactcacaactataaggaaaagcaccaatgctttaccccctaagttattttaatagaaaggagtatgagggaggggtattaatgaaaaacaatggcacagtagacaaatcaaaaattgtgcctactgctcattgaatttaatcagtaaggctgtttgataagtagagaagtggaataaaaaagcagacctagatgctaccaggccgttttatgtattacggtaagttagactgaatggctcttggtggtaagtatattctctggagataataggcaccagtacaaaaattttgtactggtttctcctaaaatacctttttgacttctgtgaggccatgagctagttcatatccatgctaaaatgaaacatgtttactattatttcccagttgattttatttataggattttagagaaggagggggtatgaaccattttgaggatttttggatttagctaacaggtgtggcttttctcttggctttgttaactggtcagaataattgcctttcttttgttaggcttttgctttgagcaagataaaattcttctctcacatagcctttattttctttttattacgttagactttgtgattttcttgaagcaagaatgctgatgtgtatgtaccctatattaaaaagaaattgcagatttcaaaaaaatggtaaaatagtgagattccataattaaatgttgtcaccttagtttttccttattttattttgtagcattttaaaaagtgctgcaaaacagcattgtggtatatttattaaaaagaaggctggtatccgtgccatagacttgccatgcagaatgggcagctgtatatttgcagatgactgctaatgtggatgtctggatagaagatcaaattatttgcctagcctagtgcattttataagagcagcagatgatgtaattagctcatcatgcatgcagactccaggatgtgtgagatcttcctatgagacctcctatggcttgggctaccagcaaatctcctggaaaaggtgaaatttggttacaggcaaatgtcatgtgatttgccctgcctagacctatgaaccatttttagcccacttctgtttgggttattcttatacagacaagagttacattaagcaacaacaatgacaataaaaaggctggcaaagtgtaaatgaaaagaattgattttgaagtgctgatcttagatatctagtgtttttatgtttctcggcaaaaatctttcacttaaaactgagtataaatgtatgaaaaaaccttaacctctactttataccatataaaagttaatttgagatggatcatagacttaaacatataatctaaaatcataaaacatttagaaaaaataatatatattttttaccttgagataggcataaactttttagagaggaattaattataaaggagaaaaatatagtaaatcagtcttcatcaacatttaagggttctgctcattaagaaatagtgctggaaagatgcaaaggcaagccacatgctgggagaaggtacacacaatacagaatttgacaaaggacttgttttcagaatacgttaaaaatattcctaagctactatgcagtcataaaaaagaatgaaatcatgtcctttgcagcaacatggatgcaactggaggccattatcctaagtgaatcaatgcaggagcagaaaaccaaataccgcatgtactcacttaaaagtgggagctaaacattaggtactgaaggacataaagatggccacaatagacactggacactactagaagtgggagggggagagaagggggcaagggttgaaaaattagctgttgggtactgatatggtttggctgtgtcttcaccctaatctcatcttaaattgtagttctcataatccccacatgtcatgggagggacccagtgggaggtagttgaatcatggagggcagtgacccccatgctgctgttcctatgatagtgagtgagttctcatgagatttgatgtttttataggggcttttccccccttttgcttggaacttctctttgctgctgccatttgaagaaggatgtgtttgcttccccttctgccataattgtaagattcctgaggcctcccaagccctgtggaactgagtcagtaaacctctttcccttacataataaatcacccagtttagggtatgtctttattagcagcgtgagagtggactaatacaggcatcatgctcactacctgggtcacaggatcatttgtaccccaaaccttagcatcacagaatatacccaggtaacaaacctccatatgtaccctctgaatctaaaataaaagtggaaaaaattattaaagttttcttaaaataaaaaaactgaatttgctgatagaaaataaaatatttctgaatcaataatgacaaacaaaccagttgaagaaatggggcaaaggacttaaagagatacttaacaaaggaagatatagaaatggccaatatgcactcaaaaagggaccaacattattagtcatcagagaaatgcaaattaaaaccacaatgaaataccatatcacacacactagaatgtctaaaatgaaaaaaatgacgatattaaatgttggtgatgacatggagcaactggagctctcaaatactgccaagaggaggataaaatggtacaacctcttggaaaagcagtttggtagtttattattaaattaacatttacctacctctgctccaggaattttactcctaactacttatgatccaagagaaatgaaagtatatgtccacaaaaagatttgtatgtaaatgtttatagcagctttatttataatttttccgaactgaaaataaccccaaatttcaacaagaagtgaataaactatagtatattcatttagagaaatactaacaataaaaaatatttcatcaactattaatgcgatctgcaacatgcatgaatctcaaaaacatcattctgagaaaaatcagccaggcacaaaaaagtactcatggcatgattccattttatgaaatgcaagaacaggtaaaactaatctatggtgataaaattcagaatagtggttgcttaggaggtgtggggatggcctagaatggatatttgggaattttctgggttaacatctgggatattctacatttttattggggttgtggttacagggtgtatgtagatatcagaaatcatgacttaaggcctgtgtgtttcactttatgtcaattttacttgaattaaaaaattctagttacattagactatgatagcgctttgccttactaaaattttgattgagactgtaaaatttacaacagtgttctccacatttagatatagtacttattcattttttctctttgttttgtacttgggaaggaaattaaaaaaaatagcacacattttttttcattcattgctcatatttcttcactgtttcctgttttaggtaaagagtaaacgaaaattacctcccaagaaatatactaaaatgttgagtcttataagtcaaactaatctctttatttcatgtgttagaatgctgagcaacttttgaacagtaagatcccaaatttccggtttgaattacaacataatagaattttgcattcaatttctgtgcttaaatggatgctggaataagttaaattgtgtaatgcttttaaaatactttaaagtttttgaaaaatgtttcttgaaaaatttaagatatttaatcataatatttgtattttttatttaaaatggagaatttttgttataaatagatgtaacatcttcaaaacacctttcagaatttttggactataatatacaattcacaggaaaacagtctgagggataaaatgcttgctcactgcacaaatgtcttttaatcaaaacttttttactaagtatctttattactgttatacaggaaccttgctattataatttttcttaaggagtgacaccaaatattgaatttgttgtcatagtgacaagcaattttgtattaggatgaggtttaattgctttcttataatctgtgatttgttatctagaaaatcatttttaaatgggctacatttgtgtttgccagagcaggtaggaatagagtgctgcagtatttgaagtggaaatgctctccaagtgggagtagagacagggaggaaaaaataatgtgaattaataaatgaaggaggctggatagaggcgagagagtaggtgtaaagatgcagggccttgagggctgagacaagatgtacagactgtgcattctggtaggcactcaagcactttctgaattgaattattaagacttaggaagccagaggaagaacttaaggagtgtggtgaggtagtcatggtgataaaaagggaagattttagaagatgcaatttgaattaactggaagaagagatctgaagcagtgagtcttgtaaagagaaatttgaatttatcaaaatgacagaaaccaaaaacattaaggagtttaggcatatgtcataatgacagggcaatgtactcactacacagcctaatggctcattctaatagactagtgggttcaaataatttatgtagtttgtgtctatgaagtgtggagaggaacactgagaatatcacattgcaggcaatcgtttatttacttatctttttatctcatggtactggtatttattactttcaccttcatatagcctcaatattttgagcccagaaaggtgcattttagtcattcaaaaaatgttagtagacattatgaagtcagccaacaaatcattaccgtatatgtaataccatgtactgggcactattctagacaccaggaatgtaatggagaacaacacagaagtagtcacgtttctcaagaagtatatattttactgctgagagagtggaggagacaatttttgtaatttattcattcacttattcattcattcacatactgatacatgctatgatgcatttaaaaatgggataatatacaagaaagtgacaagactgggccagtaattttagttagaactgtcaaggaagacctctgggaggaaaccacatttcagttaagacttgaatggtgagaaggcagccatatgaaaatctggggaaagagtatttgaaaatgaaatcatatgaaatgcaaatgaacctaggtggagatgagttttgcatgttcaagagagagaaagaagggcagtgtgagagaagtagagtgaacagtagaggaccgaggggcatgagacctgaggggcagttgaaacaccatcaaggcagagcctgtgataaaggctttaggttttattccagttgcagcaggaaaccagggaggcagggaagtgatatgctctgatttatggtttagaattgtcatttggttgctgtgtggacattaagactgagatagaaagcaactaggagcctcttgcaagaattcaggtgaaagatgataaaggttggaatcaagatgtcacagtaaagatggtgagaagatggtgtgtatctttgtggtagagtggacatgacctgctgaagaatcctatgtggagtatgggggaagacaggaaccaaggatcacatgtaaattttctgcttcagcaacttggtagataatgtggctatttaaagagatgacaaaaggtaggtgatgggagaaatttgtgtctctctgtgtgtgtatgtatgtacacacatgtccattatagtttcacataggctgtgttattgatccaatgcataactttcagtaaacatttcctgagcacatcctgtgttccagccactggcctaggtgttaggaaaacactaaaaagaaaatagagagacttgcttccaaataatttacattgtaatagagcgagccaagtaatgaataagtagatatgctttactttgttagatgttaacaatgtctatggataaatataaaaacagaagaggaagggagagtgctgaaggtagagataggttttgctaatttttttttaagtgagatcatggaaggccactttaataaggtgttgtttgaccagaagtttgatgaaagtggggtaccagtcatgtgagcttctaggagaaagagttccagtcagagtgaaaagcaagtgcaaaaatcatgaaacgggtgtgtgtttgacttattggaggaactgcaaagaggtcaacataaatgaactggggataaggagaatggcagcagatgaggccaggagaggcagggaacagatcatttaagatgttatagaccattgtgaacaatttgccttttactcagggtgagaagccaatggaggatttggggcagagggatttggtcctgtaggtctcaaagcaagtagtatttctagacctccaagtggctgatcttgtacttgagggggcagagtagcttacaggagtacacagagcatgaaagccttggcacagctggagttactgcttaggaggacaaggataaatagaaataattacatttacgtggcttttgattctgacgctttgttagaaactttattttggctatttacaaacctgaaggaaggcaattttatttttccataatcaaatggaaatatttgtgggaaatctatgctaaaataataacttctgtgaacttttctgttcaggacagtatttattttgtagccattaattcattttcaaatgattgcatgtcatttacatttgaataacacacctgttaattagtttcatctaatcagtcagcatagaagcttgtgctggagaccaaaatgattcatacagcttggctcctgaaataaatctggactccaatttaaaagaaaatacataaatacatatctataccaccaatacacatccataccaccaaaagaaaatacataaatacatatctatatataataaaatgtaattttgcagaaaatattatataatattatataacactacttgatgtgttattatatttttaatatcttatactgcctaggtctggttgtttagatggttatatagatgtagatttagtaataaattcaaagcttaagaggattaactgaatttcagagttgcaaacataataaagcttctcaaaattctggttcatttatgattcactgagatattattgatgcatacttctcaatcaagtatcaaataagtttcttctgttatttatttatttttacatgatttgaatggatatttttatgatgtgtaccaattgctactctaattgacttgtagtggtagagaaagtaggaaatatctatttggcttagaggatgctgacatcccagcctgtttgtacaaatggaaccaaattataacactcaaatattattgccagttagtactctgttttgcatgcattaacccttcaaacctcacagcaatactgtgaggtagagactattaatacagatgaggaaaaggaagtactgattgttgaataactgtctgtatgccgaggtcatacagctattaagtagtaggcaagtatttgaaaccaaggccttttgactccagaaaaaccaaatcttactgtgattggcttatttcacatatcttgggagctcacaggagtttaacctggtgaaactgaactccagcctccatttaccagatattcctcctctcttcctctgttgtttcttacacctagtgagcacctcagggaaatttcacaaagttcgtcacatgttcttttgaatttatctgccaaacaagtttaccacatttctgccagttcttcctttttgattccacctttcccatacccatatctctgtttatgaggcaactatattgttagatgcgaaaatgctgatgtctgtgttaaaggtatttttccttgctgcttggaaaagtcgttaatcctcaaggtcagagcaggcctaggattcatgcagaagcggtaatgaaccccaactcaacaatgggtggcatgctgtcactttgacattgaaatagcactgcttgtgggcaggacttcagaaaaaaacttattaaaagtagattctccagcttctacacttaatgtggctctcgatttgtgcttcaaatatcctgaggggttaaatgggaccctaagcattttcctatcctttacatctctttctcttctcttactgcccgaaacaaagcaaaatgaaaaaccctttcctttctctttcaccaaagccattgcacttcaagttatataaatggttactcaaacagattccataacttggcaggccactttggggtttaatagtgaatccatatcataatactttttttttttttttgagatggagacttgctctgtcaccccagctggagtgcagtggcatgatcatggctcactgcaacctccgcctcccaggtttaagcgattttcctgcctcagcctcctgagtagctgggattgcaggtgcctgccaccatgccaggctaaattttgtatttttagtagagatggggttttgccatgttgatcaggctggtctcaaactcctgacctcaagtgatacacctgcctcccaaagtgctgggattacaagcataagccactgtgtccggcccatatcataatactttttaaggctgttgggcaaaggaatgcttctgaacaggctcaggatccccatataaattccagggtcattgggaggccgaggcaggtacgtcacgaggtcaagagatcgagaccatcctggccaacatggtgaaaccctgtctctaccaaaaatacaaaaattagctgggtgtcgtagcacacacctgtaatcccagctacttggaggctgaggcaggtgaattgcttgaacccgggaggcggaggttgcagtgagctgagatggctccactgcactccacctgggtgacagagtgagaccccaccacaaaaaaaaaaaaaaaaaaaaaagtccagggccatcaaaaacctagagaaggggacataatttagcagaaagaaacatattaatgaattctgtttaaatcatgaagagatgggtgcaaggttagtcttaggcacaaatgtgaatttgacaatgtttgtcttcagggttgcccgtcttttctttctcaaccattcagtttcctccctggcatagtcctttatcagaatcaggaaaaaacaaaaacaaatctcactgtaaattaagtttaataactttgtgcattttaaacttatttctaattagaagatgacaggcttcattattatcaaaggagcttcagacttcattgtgggggactagaaagggagaagacttaagaagtcttttctggcagccttacaaattgcaactcacaacctaccagctattcagcctataaggctgattcagttagtggggctatttaaagatttgtctaatgcatgctgagaagttaaacagaagtatcatgtctcttcttgttcttgggtggtgtgaaattcatttgccttggaaggtttttttaactctgtgaatgtttgcactttgaaagaccatattcttaatttggaatggcaactgtgccagatatcttggcaactttacaaaaaataactttaatgttaaaggaaaattatacacaatgaaggctgtcatagtatgttgcattgataggggaaagaatggaattaatataacattttcttgttaacttcaaatttcaaaattaaaacacattttaatacaagcaagaaataaaataataaaattctggaacatataacttttctgctctttatattcgcagtaactagaaacaagaaaatattttctatttaagcaacaactataaccaataatggtgataatttgttattgtgaattcatatgagagaaattagcaatgagagatttttgcagctaaagagaattttaatgcctctctatttagctgaatggacctttggaaatgattccttagttggaatgtgtttgggttacaatgatgttatcaataataatatagtctaccactattttttcagcacatattgtgtgccaaatatcaatgcatattttcagtgtctatcaaaaaacctcacaggtaaagataggtcttgttcttcctaatttgcagaagaaacagaggctcagagagttttgtcaacttactcaggcaccagtaaagtggtcaaattgaaattcaaaccctcatcaagccagacttaaaggctttgttctttcaactatatcctgcttatgtctccaaaacaaaaattaatccctatttgtcatgccagtatataagtggcagtggctataagggagggacagttagtttggaccagggaaagtaaagcaaggtcttgttggagggagggcaatgaggaaacaccaagggttaaaggcgattccagctagattagaccaggaaaaatagtatttatcatcatacttctaggagaaacaggagcaccaatggtgggtcatggctggtggttgaaccaagtagactcattagtagcaggaaaatatattgcaaaagatttgaaaaatagctaaagaaaaggtattccagttgaggatcttaaagaaacatcatgcttacatttggcaatttcaggaatatctaataaaagaactaatttaaacatgtggacaggatatagagaagtaacaagggacaatgtgatctcctgaggaaagtaacaacaagaagctgttaccaccactcatacacctgacatggtgacagacagtgactcctgaaacctggagatgatagttagtgtggagagggtcatatcacaaaagctgtgacctttgcagcccctgattcaccacacaggtagggagctggaggagtaaatacttcatctcctgtcctactgtccatccaataacttattgtggcctttgttggtacgacaggaagctggagggcaaggtagtctgttgataagttccatgctgcccagcctcctggacacagagtagactggagaaaagttggagaggagatctggaggtgcaagtggaagttagccagcacaagatgttaggcagagaatcaagaaacttgcttcggaatcaagcatagggcagagctggggcaactgaatagctggattaggatcaaatgagacttgagagctgaagctctagcttccttttttcactgtattggttagaatcattcattcattcactcattaattaattaattgcttaatttattcaacaaaacattcttcagttctactatatgtcaagcatatggttatcgtactaggttcagtacacactaggagcctagtcatgaggcgtgttaaaaaggcaaccagaaacctcctgacatgcttattaattacttatgtattattctattatctgccattactttgccctaaactctgaaggtgggggccagggggtctttttaggttcttagtctgctttatgcggctacaacagggtactggaaactgggtattttataaagaacagcgatttattttttatagtactggagcctgggaaatccgaggtcgagggacccatatctggtgagagcttactttttgtgtcatcctgtggctgaaggcaaaagggcaaaagattgtatgtgcatgagagaggggagggggaggaaacccactcctgtgatagctaacccactcccgctatagtgacctaatcacctcttaaaagtcccacctctcaaaagtcccacttctcaacactgttgcattgaaaattaagtttccaacacaggaactttggaggacacattcatagcaattcataacaaatcatagcgcaacaaatcatagcagttatattaaataattagactcacaagattatcataaattacacatggcatcaaatttgcttagaagcatatgggacaagaaccttagttgcccagcagggcaatgtcagttattactcttctgtggaactagccctcacggcagtgcatggtgaagtctttgctgcagcacaagagctatactctttgctttctctttgctatgaaagaatgattctcagagcagctgtgaaaattcccctggtttaaaaaccacatgtcccacaggagccagtatcttttgtaacaactccataggcagggcttctgtggtctctgaaaaaggcatgtccagtcacaaaagtctaaagctatagtatccctatcaggtatttatcatttatttataatttttctcactccacatacaattagccaatcagtttatttttaccccaagcaatcctgcctattagcatatttgacatacttcctttatcaggttgtcaagggaatagatctagaaagtgaattaaagatcagattctaagggagaaagggaaaatattttgttaaccctttacccacacacattatgcttctaattagggatttgttggatcaaacagaactagagaaaagtttaaaaaggcacgtgacagttaaagttcctaacttgggtagggtttggcatatctacagacaaatttagctcctgttacaaaaaagaaaacccatattccactttgcaccagcaaatgattttaaattgtcaaagtgattcaacagtatcatccaaagaggtggtcaacaattacgtgatgaattattattgaaactattattattgtgaaggacaagttgctggatctacttctgtattaaggtaggccttggaatgagctgatatcttaatatttagtttgcaaagcgctaaaacattacaaagatgctgtattttctgtgtcatgaaaaatggattagcatagccattgaaatatgtgtcaaacatctcaaaggttaattgcttctcctttgtcctcttataggacactaaacttttcttattatgttgtattgtacttttttagtaaaaaattatccccactggacagtaaaccctctgaggacaataatgatgtttatctcttcattgcatccacagcatataatgcaatgccttgcatagtaaatacttagtaaagttagttgaataaatgaatgaataaatgaaagaatgtaactataattcatattatagtggactgaaattttggataaaatatttcttataggactaactgtctttgttcaatggtattaaaatctgacttccctataattttattttctatagaaagccagtcacgtgttttcttttaagaaagatatatgaagagtgacccattgattgttagagaatgcagacagctttgatttgtagtacatttttctacagggagctactatggaaattatttgccagggtgcctaagaactctcccttgaacttcaatggacttttaatattatctttaaggtcctcgtagaacagttcttaagactcatagatgaaattcaattcacagaatccactgcaagaaaagagattctcaaatttatttagagagtgatgcagtacaaatcctaaagaaagaaaccactgttggaagtttagcaatttattagactaataattccacatgttacatttgatagtgatttaaaatttacaaaatattttatgtgctattttaattaaaaccctattttagagatgaaactcgtattttacaaatggaaagcctcaaaacagaatgacattgaacacagaagctctagaatcaaacagcctgggtccaaaatgagactgagtgatcttgggtaaaatactttatttttaggctactcagtgtcttcatctggaaactggggaaaatgatagtgcttgttgtatagggttattgtgagaattgtaaaatgcaaaactcttagaagagtgaatggctattattaacttacttgaagccaaacagttaatgagtagtaaaagagaaatttgaatccaggttgtcggttttcaactttagtattattttcaccaaactccattgtatatgtaatatttatttgacttttatttagaatgatgcagattttgcccatgtatcacttcctctgacatttggagataacatagtttaattataaatgtatggtttatctctgaactgtgatcatcttggttaaatttattggataatggcagatagctgatggttttcatttgtagatgcaaatggcttggatggtaatgttgtaaaattatatctttatatatttattacagaaaattcagtgtaccaagtcactaatcacctaatgattattcaaaattatagaaaaagcatcactaagatatgaaagcaaggctttctttgatctatcataaatacctcagtttcccactattggaaatataaatctcttaatgtggtttgaatgcttcctggctgcataaagcacagattcattttcacattcacagtaccatttttacctctatacagagctgtttggtaaaatatcttatttaacttagaaatagtactttacagaagacatataaatataaatctaggttacaatcatgtgagtgaaaggctatggtaggttggaagagagtttgaatattttgtgtttgtgttgtctgtgggacctccaaatgtagatgtttaagaagacattagatatatggatttgggatttaagagaaagatttggaatggaaatatagatatttcagaagctaacatgaaggagatagtttcaatcatgacagtggctgagatgtctcagggagaaatatgaagaaagagcctatgtaaggaaacttggggaacattagaagttaagggatatgtagcaggagttgcaaaggagactgagaaagaaaaactcaagagtcaggagaaaagcccagagagactgttgccctggaaaccaagagatccattcttctgacaaacattttttgttattactttatataaaatgataaaaatcagtgaaaacagcaaattagcttatatgctaccgaaatgagacagaaataaataagtaaattatacattttgttagaagatgttaagtacaataaaaatataataaagcaatgtaagagagactgggagtgcaggagtcagtgctgcaattttaagtaacagtctggttaggtaagtctcaccaagaagctggcattttagcaaagacttgaatgaggttaaaggagagagatataaataatatcaaaaaggatgcagtagtctatatttttcagaagggttaggtaagatatgaattgaaagtttccatttgggttttttgaagttcggagtcaacactgagacaaaagcaaagatttggtggctggagtgggataaagggcagattgcattggatagaggcataaatttatggtgaggaagaaaagacagcaagcatgcactattctttctaccagtgtaattgtgaaaggaaaaggaaaaaacaatgtggtatccagaggggacatggattcctaaagattttgaacataattatagatacagtgggggtaaaccaacatagaaggggtttaaaacccaggagttgacaggaggatgttaatttataggaggaggcacctgagaacaaggaaaatggggaagagagaatagtacataaatggagaacgagctcctccacttggaaaaaaatgagtaaggaaaggttgagttagttatacacaatctagtgatggggagaggcaaatgatgactttcgtctatgaagtaaggagttaaggtgatttgctaaaaatgataaggtaggtaatgacaatagagatcctgcaatgatttcatgtggactctgtgggacaaagaataaggagatgaccaggactgcagaccaattttcagagtttacttgaagccggaatccttttttcatgaatttttcatatcattcatcttcacgattgagcattgtgacttttctctagtaggtcctatcagtctaggcatagaagaagaatgaatatacagctgaactgatccaggtctgaagttttgccttgtgtgtgtgatgaatcgatcaggagaatgtgttaagggagtctgcaagagtatattcagaatgacacttagattagttgtagaaaagagaataaataggaatggactgatgaattgggaacaaatggagagattaaagggaaaagggcatggaatgtgtgtgaggaactgatataagaggatgtggttcaacaaatttgaacttggagtttaagagttaaaaaatggaattgttctaggtaatagaaagctaaaatgtggatgcctgaagtcaagcggaggtgggtaataaatagaactgaggacaaagagtgtgaggcaagattatcaaactggtcaaccacgtgaggactaatttcatggagcatgaaggcagtgatgaagagggagactgtgaaccaggtatgaagttattgttgaatcagtggaagataaaaaatagaagaaaaaagggaggcgataaatggatcacgtgagtcccaaaggaagatttagcaacatttaagacattctgctagactcaagaagactgcctagggaattcactgtgagtggatatggtacatggattcagtattcatcctttttattagcaaattaagctacagtgtatcatatttaccaatttaccgtaacccaacctaacctaagctggtaccttaattaaatggacttttgcttctttcaactattctgtttggatgagagcaaaatacaataaaataagttaatattaggggattaataaaaatgccaacttgttggtcatttatggttggagatatattcatgctagtgtcctatatcttctctattttcttctttaagatgacacaataagaaatgatatttgaaggaaagacagaggaattgagatagcatggccagctatctgttgtaaaagacctaatgcaaccattaaaaatggagtataggccgaggcgggcggatcatgaggttaagatcgagaccatcctggctaacacagtgaaaccccgtctccactaaaaatacaaaaaattagacgggcgcaatggcgggcgcaatggcgggcgcctgtagtcccagctactcgggaggctgaagcaggagaatggcgtgaacccgggaggcggagcttgcagtgagccgagatcgcgccactgtactccagcctgggcgacagagagagactctgtctcaaaaaaaaaaaaaaaaaaaaaaaagaaagaaagaaaagaaaaaaatggagtataatacataaagttcagatatttggaaagaagtgtgttgagtttcaaatcactgacaaaaactaaaaataagaagaagtatgatttttagtttacctataatgtggctatttgctcagaaaaaaatctaggtacttactaaataaatatttgctctttttgagatatatatcttattcccatgaagatctgaaaattttttttctctaattttaatggaactctcaggtctcagaataagcaaaacagaaagagaatgttggtaattttggtcaattttaaaacaggataattgaaggagtggaaacttttataaaacaactttatagctataattttctcattgtagctataactctgtaggttttgactgtgggcaattaaaatgagtaggccaattttaaggatatatttccactattctctggagaggatgagcaagctactgacacattcatcatgcactgggatgaaagcactagttcggccaagtatgagattggttgattgtagagacaaaagctacagacaatgttataatgtacaaaatacaataaaaattacttgtgggagaagatggagaaatatctcgattctggtgtgcttgctataaatgaggttcctaaatgtagaaacttgtctggtgcctgtaattgcttcattcagtaatactgtacctgtctgacacctgctcgccttcctttccatttgttttctctattctttttttcccttcttccattttttaattgaataattatattttaggtactaagcacacaccagggacaatttgatgctgtgaataaataggtaaaacatattctccattcttaaggaacctacattctattggggtgaaaattaagacaaacagatatctaagatgagacaaataacattactaaatagcaaggtagtgctggattatttcagaggccaattttagtttatgtttagggtcttggcaaagcagagggaaccctcccaccccatcccccagaaaaataaaatttgcttttgataaacttttctagaatttagcaattgaaaaaaagttaaacagaaccttgattttttaaaaaaacgttcaatatagataccacatttaacattcaaaataagattgtactttgagttagatatatggtgtggtctccaaagttcccagcctagcactgcttacgggcagactgaacagcagatacactatcaggacagcatatatgccttcagagaggaatgcagctcttcctctcgagatgtcttcctctgactcagtgtcctgtcttaaaatgtcatggtgcattgatgaagaagagtgagagtcagagagagagatgtcacccacagaaaaacttcatatcaaattccgttcatgctctttattcattgacacagggatatacatttctgaaaactctatagagcacaataaaaaagagcaggtgagtttattttagaacccaccgtgaactgctgttgataaactggatgagtagcaaaatcccaggcaaaactcagctaggagggcttctccattttactactctctacccaccataccctcgatcctaccacatctccaatttagtctcttcttttttttctttttttcttttattaaatcagaatatctttatcattatttttctttggaaaatagaatcccaaggatatgttactctgattcagcagattagttaccttggtgatgtcacttttatgttacatcttcataaaggaactgcatttggatgttagcttatcttctgttgaaaaataagtgtgatcagagcaagcgttttggtatttccgagaatacttacaaaaaccccaatttttataagcctttaaaaaaagatgttctaagtcctgagtgacctacaaagagacttagactcccacacattaataatgggagactttaacaccccactgtcaacattagacagatcaacgagacagaaagtcaacaaggatacccaggaattgaactcagctctgcaccaagcggacctaatagacatctacagaactctccaccccaaatcaacagaatatacatttttttcagcaccacaccacacctattccaaaattgaccacatagttggaagtaaagctctcctcagcaaatgtaaaataacagaaattataacaaactatctcacagaccacagtgcaatcaaactagaactcaggattaagaatctcactcaaagccgctcaactacatggaaactgaacaacctgctcctgaatgactactgggtacataacgaaatgaaggcagaaataaagatgttctttgaaaccaacgagaacaaagacacaacataccagaatctctgggacgcattcaaagcagtgtgtagagggaaatttatagcactaaatgcccacaagagaaagcaggaaagatccaaaattgacaccctaacatcacaattaaaagaactagaaaagcaagagcaaacacattcaaaagctagcagaaggcaagaaataactaaaatcagagcagaactgaaggaaatagagacacaaaaaacccttcaaaaaatcaatgaatccaggagctggttttttgaaagcatcaacaaaattgatagaccgctagcaagactaataaagaaaaaaagagagaagaatcaaatagacacaataaaaaatgataaaggggatatcaccaccgatcccacagaaatacaaactaccatcagagaatactacaaacacctctacgcaaataaactagaaaatctagaagaaatggataaattcctcgacacatacactctcccaagactaaaccaggaagaagttgaatctctgaatagaccaataacaggagctgaaattgtggcaataatcaatagtttaccaaccaaaaagagtccaggaccagatggtttcacagccgaattctaccagaggtacaaggaggaactggtaccattccttctgaaactattccaatcaatagaaaaagagggaatcctccctaactcattttatgaggccagcatcattctgataccaaagccgggcagagacacaaccaaaaaagagaattttagaccaatatccttgatgaacattgatgcaaaaatcctcaataaaatactggcaaaccgaatccagcagcacatcaaaaagcttatccaccatgatcaagtgggcttcatccctgggatgcaaggctggttcaatatacgcaaatcaataaatgtaatccagcatataaacagagccaaagacaaaaaccacatgattatgtcagtagatgcagaaaaagcctttgacaaaattcaacaacgcttcatgctaaaaactctcaataaattaggtattgatgggacgtatttcaaaataataagagctatctatgacaaacccacagccaatatcatactgaatgggcaaaaactggaagcattccctttgaaaactggcacaagacagggatgccctctctcaccactcctattcaacatagtgttggaagttctggccagggcaatcaggcaggagaaggaaataaagggtattcaattaggaaaagaggaagtcaaattgtccctgtttgcagacgacatgattgtttatctagaaaaccccatggtctcagcccaaaatctccttaagctgataagcaacttcagcaaagtctcaggatacaaaatcaatgtacaaaaatcacaagcattcctatacaccaacaacagacaaacagagagccaaatcatgagtgaactcccattcacaattgcttcaaagagaataaaatacctaggaatccaacttacaagggatgtgaaggacctcttcaaggagaactacaaaccactgctcaaggaaataaaagaggacacaaacaaatggaagaacattccatgctcatgggtaggaagaatcaatatcgtgaaaatggccatactgcccaaggtaatttacagattcaatgccatccccatcaagctaccaatgactttcttcacagaattggaaaaaactactttaaagttcatatggaaccaaaaaagagcccgcatcgccaagtcaatcctaagccaaaagaacaaagctggaggcatcaccctacctgacttcaaactatactacaaggctacagtaaccaaaacagcatggtactggtaccaaaacagagatatagatcaatggaacagaacagagccctcggaaataacgccgcatacctacaactatctgatctttgacaaacctgagaaaaacaagcaatggggaaaggattccctatttaataaatggtgctgggaaaactggctagccatatgtagaaagctgaaactggatcccttccttacaccttatacaaaaatcaattcaagatggattaaagatttaaacgttagacctaaaaccataaaaaccctagaagaaaaccaaggcattaccattcaggacataggcgtgggcaaggacttcatgtccaaaacaccaaaagcaatggcaaccaaagccaaaattgacaaatgggatctaattaaactaaagaacttctgcacagcaaaagaaactaccatcagagtgaacaggcaacctacaacatgggagaaaattttcgcaacctactcatctgacaaagggctaatatccagaagctacaatgaactcaaacaaatttacaagaaaaaaacaaccccatcaaaaagtgggtgaaggacatgaacagacacttctcaaaagaagacttttatgcagccaaaaaacacatgaaaaaatgctcatcatcactggccatcagagaaatgcaaatcaaaaccactatgagatatcatctcacaccagttagaatggcaatcattaaaaagtcaggaaacgacaggtgctggagaggatgtggagaaataggaacacttttacactgttggtgggactgtcaactagttcaaccattgtggaagtcagtgtggcgattcctcagggatctagaactagaaataccatttgacccagccatcccattactgggtatatacccaaatgactataaatcatgctgctataaagacacatgcacatgtatgtttattgcggcattattcacaatagcaaagacttggaaccaacccaaatgtccaacaatgatagactggattaagaaaatgtggcacatatacaccatggaatactatgcagccataaaaaatgatgagttcatgtcctttgtagggacatggatgaaattggaaaccatcattctcagtaaactatcgcaagaacaaaaaaccaaacaccgcatattctcactcataggtggggattgaacaatgagatcacatggacacaggaaggggaatatcacactctggggactgtggtggggagggaggaggggggagggatagcattggtagatatacctaatgctagatgacgagttagtgggtgcagcgcaccagcatggcacatgtatacatatgtaactaacctgcacaatgtgcacatgtaccctaaaatttaaagtataattaaaaaaataaataaaataaaataaaataaaataaaataaaaacgatgttctatttaacattgagaatggagattgcaatcctgcctcagtgattttaagaatcagcatcagttttaggcttctaatgtgggaacaaatatcttttgtgatggacaattccttcacttctctgagttgctccctgaagttttattttagtgagaaaattattggctagttggttcaaagcaacactttaactgcatgattgagcttacttcatcccagctatgatttcaactgttacaacattggctgcagaggaaaaataatagttttctcctagagtcaatctgtcatgtcccctggctgtgttgtagctcatgaccactggtgaaattaatcagtctggctctttgagaacgtgtttccttgacagtagtacattgttaaggaagcattgtccatgacttctttacaacatgactagattttcagaaactatgtggtttacttttttttactttctttgccattttcttgattccataataaataagtttaaagagagtcagggaatgctagatgactcctctatgaaattgagatgtaatttaattaaattttcagagataagttgattcctcacttcaaagttggatagatgttgcctccttctaaaattttttcactctaaaattctctaggctttcagtaaatattaacagcaaaagcatagttcagcgggaataagagttatttttatgagatgcttaatttgaggatgtagaattgccttctgttaatgttgtttaaaatagaatagagtaagtctgtctgggatgttttaagacctctgaatgagtacttaagatgaccacaaatacagtataaggactactttaaaaccagccacttgcctctgtgattactggagagaaatgttcatttcaaaaccctttcttgcccaagacaaacagatttatttaatcaatgatcatagctccttggatgtcataaacttcctgaaaagtttgtaaagatcggcattcctatgagtctagctggactattcactatgacaagaccttaaaatgttttttagtccatcatcctcttttagacaaaggcaaagtatgagacatagtcatcagatattatttctagatactctatttttgggcacttgtgtccatccttacttcatatgatttcccccctttttagacatgaggctttttgtagttcagtgacttagcatttttatttcccattctcaggatggttctgtcaaatgcagactccatagtcagaaatgtggtttgttttggtatcattgtataattatgaagtttctttggtttgctctcataggtataagcatcttgactgcagttgtcattagggggcccacctggcctagaagtatattttcaaaatatttgaaaagagtatttaatatgggatttgatacaataaaaatgtattcaccttttgttggcagtggtcaaacccactatctggaccaaaaaactatatcccatgtactgatcattactgtagattgtatgtgcagatagacctggttctgactgaccccaaatcacttccaaaccgtattttctcctgccttcttacattatagaggctggaaagattttttaaagttctctttccagcttcctttgacaaaaggggtgacatagttctacccaagtggaagtctgctggcatagcatctgagaaaatgtctctttccaaattaacagggacaatttggtgggcacaggtccacccctacttgttttagcagctaatggggatgtgatgcttagaattacagcaaccgccttgtgatgatgaaggaatctgcacaggagaatcatagacactggccttacataactgagccactaaaccaatgctagcagccacccacctccagatgtcttttgaagcaataaaaataagctcctatttattttagccactgttaggtttcattatatgcatctgaaagcatatggtgtgtgtgtgtgtgtgtatgcatgtatgtataataaaattctggctttagccgttagtttctcctcacaagggaactgacagaagccagaggttgatatggccaagggaatttacttgggcctatttagatttcttctcctttattattttggtttgctgatttagattagttctatattttcctgtgctaaattatacttttaaaaagtatttcagagccttctaagtctttctgaatttgttcagaacttagatttccaatagtgcctttattgatagcacatctttattctcaccattataatactcagatttatggtttgttctcctttgaaatatttaataagattgcagttcagcagctctttattacagaaataatgatattactgctctttggtgttttcagtctgtttctctttgcctcagtctacaggagtaaatctttctggttaaccctgcattgtgttagaaggagatcgtatatcccgattctcagtttaggtgggcaagaagagttgttctgtggagtctgacttgagaaagattcttctttgatgaagcatgagctctataaaacttccttgtggtatcataaaaaaccttttctggctgtagccatttgagatttaactatttcatcatttaatgtctactaacttctaggctgccttctcataaaattcccagtgcctataatatgcatatggtaggtgcctagtaaaggtatattgtttaaatgttgaatgatgaattgagattttaaaaaaactaattactgagttatcttgataagttttcttgactgttggttagaatacagtttgtatctcacacgagattgtgagctggctttacaaaagatgttaacaaacgaatttaacattttaatttaaacaaccagcaattttcaaataatctctctaaactgattgtgaaacacaagctttaaaaattagaaaaaaaccaatgacacactgagaaattatatggctgtcaaaaagtaaccacagggtttcacaaaaatcaggatctcataaacaccatatggcgattgagtacttctttgcgctttttgcttctggcctgagacagagaaatgcaaaaaccaaagaaacacagctttgactctttatttagctctgttaaccctacagagatcatgttggctgaggggaagaaaagtgtccagctacttgatatatgacaacaaaaaattagaaggacctttgagattggccaagcctgacatcctgaaaattgtctcttttaaattttttgaaggatgttatcacttggaactttttgccattaacctacattcccaacacttccatagttcgatgctgctgaccatgtttttcccagtccctagaatgccttttctctattataaatctcctagtcatctttcaagacccaaataaaatgtcacctctactgtgaagcactcatcaagtcctccaaaccatcttagaaattccattttctgtattgtcagatcacctacacaacacacacacacacacaactacacacacagtgtttatctattatagcaccatcacctattatggtaatttgttgatttatgtgtctttctcccttctagaccttaattctatgagagtaggggctgtgactcatttatctgactaaatcatggcctaacgatgcctcagacagagtaagtgctcaataaatctttgtccaattaatgaatctcctggagaggaaaaaactcagcagtaaagattcaatgggagttaacaaaaatgtatattaacaggacctgggatcagggcagggagaaaacatgagttagattaaacaatgattgttaactatttaggatttgtaaatatggtgctcaattataccagtatttctcaggatgcttttgagtagaagaaagtgataccctgattcaagctggcttaaacaatgagagaacatagaggaaaatacagagacagagacagagcaggctgagggtatagtacaatagaggcttcgctttctcatcttaatgattattttggttcttccctcttccttctttactttaagctggcttccttcatggttggcagttggttgacggttggcagaattggcaattaacatgcatccttattctctctggctgaagctgagtaaacctaccctcccaccaaggagtaaagattcttacctttagtctgattggtccaacttaggttgcacactaccctggagcatcacgggatgttgaggaataccatttagtacttggtaggttggttgggatgatatgattggctactaatcaagagaccctcctgaagttgtagggaattaacttcctatgccagactggctgtgtgtgggaggagtagcgtggtgaccagcagactctagtgtcccactgcctgcattccagtcccacctcttctgttcacctgctctgtgagttcaggcaagctgactctcggtttcttcatctgtagtggaggtggtaacaggacctacctcatgatattactctgaggtttaagtgagttattagatgtaaactactaagaacacatggtaagcaccatggaagtgtttgttagttttcccttcttaatgatttaaccaaaattggcgttgtgttaaaagggcaacagcagggaatacattcaatttaagcaacaaaaatgttcattatataagtttttgttttatttaacaacttgatgttgttgttgttgttgctgttgttgttgagatggagtcttgctctgctgcccaggctggagtgcagtggcgcaatcttggctcactgcaagctccgcctcatgggttcacaccattctcctccctcagcctcccgagtagctgggaccacaggtacccaccaccatgcctggctaattttttgtgtttttagtggagacaggatttcaccttgttagccaggatagtctcgatctcctgacctcgtgatctgtccacctcggcctcccaaagtgctgggattacaggcgtgagccaccgcgcctggcccaacaacttgacttttaaggttatttaatttatttttgaatgtttatttctttgtaatgatgagtttcaatttttaaatgaaaggataaatggaaggataatagcatagaaaaacatgtgattaactgtctattaatcatgtctggaaagtaagaaacattatttgcctatttattctaagagtgtttattatgccaacctgatggccatataaaccaattacagataaagtatttaaaaataattttgagtaatatattttggggtttaattagatttttaaacatcatctactttaccctttcattttgcatatcagaaaactggaccagaaggaattaagtaaactttccccaaattgtacagttggtggcagaactggttttagaggcattttaaacttcaatcaaatatttttttactggcccatgtaacattcctcttgagtggtagacccacaaggcctaaataactaaagatagagatatgttctccttattaagaattggcactgtgggcctgccacagtggcttacacctaaaatcccaccgctttgtggggccaagacaggaggatggcttgagcccaggagtttgagaccagcctgggcaatatagtgagaacttatctctattaaaaattttaaaattaattttaattaaaaattttaatcaaaaggtgtgatggcgtgcatctgtagtcccaactactcaggaggctaaggtgggaggatcacttgagcctggaaggcagaggctgcagtgagctgtgatcacatcattgcactccagtctgggcaacagagtgagagcctgtctcaaaaaaaaaaaaaaaaaattggcacttgtgctagtgtgtgttttgtaatttgtggtatagaaccatgtatacagttgggctcagcaaatgaatgttttcaaagcactcgaatataagctgtctaaagagctcttatagttagtgttatgacatgtacaggactaaaagagacaggctacccaggtactgaatatgacttaagtcatattttccaggaacatggttacaaatactagctcaaaattttagatgtatgaaatgaaatagaatgttgagcagatttcctggagatagctatattaatgtttataagaaggagaaaaatgcatatctagaccacatattggataaaattcccaaatgttagatactgcaaagtgtaacataggaaatattgtgtcaatgctgaaggatggggaagcaatctagagccttccaaatttcacagtagagttttaaaaagaaaatttctcagactcaaagagatcacatgatgcaattcaaaataaaaaatgtgagaatacttaataagaagctcagccctttcattatccagcctagagctggtttttaaattggttgctaacattttatggccttaccaacatgtcttctaggaatcacaaaatgcacgtacacactttatgctacactttatgggccctttctgatgttcactggaagcatcataagccactttacaattcctacaggagcctgttttcattagggtggcttctcagctggcagttcacttattcatgctgaaggatgctattattaagaactgttttgaactgaaacactagaactcgaccttcatttgatgcatcattaaatagagacataagatcaagtaagtgttagtgagcagtgatatattttaaaatctattttaaaaattgcaggcatctcaaatgcaagaaactttacctttcatatctttactgttgcataaattttgcaaaatttagttaattctttggtttcatgttattaataaaaaatgatcttgtatgaataaggtataatttcacaaattatgaggtataaaatggttgattttttttgagtgttttcgtaagtgcctaaacactacttttctttttcctacagactttgtctctcctcctttttatgctttttcagttgtaatctaagagctataaaaacatctagaaaggtgtacatgcctttgcagcactgtggatgtgccaatgtcagcctctacttatgtgactcttgaaacaatgcttctatttgagcttctttcctgtgctccagcactaatcattcagcaagtatttattgagttgctattgtgtgccacttagtgttactcaaaatgaaactcgagccatttgtaatggttttgactagtaaagagtcacaatctgacattttaacaaggttcctctggtagtcatgtgtagtcatgaaacttacattctagtggttggggaggagctcgggaggtaagcaagaacaataaacaaacaaataaagttaagtgtacttttacagagaacagtgctagctatcgacaaactaaagcaggaaagagagattcagactactaggattgggggagggggtgggaggtggggagaagttttaaataggatggtcaaggaagacaccactgaaaatatgattaagccctgaagcaagtcagggcaggaaacacatgggaatctgggagaagagaggttcaggctgaggaaagggcatgttcaagggcccagaagtgggagcatgcttttatcagaggctgtgtgcaagcctggctagagtgtaatgagtgaggtgaggaagaggagagaacaagttctgagaggtcgctagattgtaaaaacctatcaggccattgtgagggctttggatttcactcagaatgagactgaagccatttgcggttttgaccagtgaagagacacaatctggtgttttaacaagattcctctggtagtcatatgtagtagaatagaccaatgtgtgtgattaatgactaagtatctccacaattaaggcttctaggcacctcaaactcaacatctgatgtatccaaaatagaaactatcatctgagtggggccaagatggcttactagaagcagctgagttgggaggctcccatggaaaaaaaaacataataaacgtatgaatccttcactggcaaccaaggtatccagtttctctcatcaaaattgactagaaatctggcgtgagccatggagagaaggaagacccacacggggaaggggacccccctcccgccagccaagggaggcagtgagtgagcgcgctacccagctgggaaaactgtgcttttcccacggaactgtgcaacccaatgatcggaagatcccactcgcaaacccatgccaccggggcctagcgtcccaaccccagaatgcgcagattcttcggctagaatctgcttaagcctatcgaacttccgggggaggggcatccagcacctgccactgcctgttgtctaagcatttgagctcctttggggaggggcagcagccatcactgggactcgaaactgcctaacatgctaagctctctgggcaggggaagagcagcacctacttctgtagctccaagctgcgcttctcccctgctagagccagggaggctggatggcttggtcccaagacttgtccccacagcccaacacactggctgtggcagtcagggcctacagtggctcttcaggtctaaccctgacccatccttcctcagtgggcggatcttccctgcaggatctccaataattccagccagaggctcagggacagaatttggatctccctgggcctgagcccctagcgggaggggcggctgcagtctctgcagcagacttagcctctccttctggtagttctgaggaatctgggcagcccagacaagtgggtttccctcagcaaagcacaccctctccatcaagggacaaagagcttcattaaatgggtcctgctccccgtgccgcccaactgggtgagaccctccaacaggggttgtcagacactctatatgggagcaattctactggcatcaggttggtgcctctcgaggtcagaggtcccagaggaaggagtaggcacccatctttgctgttctccagcctccttgaatgacatctccaggcattggaacaaatcagatgaatagggcctgaagtgaacccccagcaaactgcaggagccctatagaagagggacctgattattgaaggaaaaacaaacaagcagaaagcgacaataacaacaccaccaccaccaccaacaacaacaaaaaagacccccacaaaaaccccatccaagggtagcagcttcaaggaccaaaactagacaaactcacgaggatgagaaagaatcaacaacaacaaaaaatgctgaaaacccaaaagaccagagtgcctcttctctaaatgatcgcaacatctctccatcaaaggtgaagaactagacagaggatcagatggaggaattgacagaagtagccttcagaagatgggtaatgaaaaactatgctgagctgaaggagcatattctaacccaatgcaaagaagccaagaaccttgataaaaggttagaggaattgctaattagaataaccagtttagaggggaacataaacaaccagatggagttgaaaaacacaacaggagaacttcatgatgcatacgcaagtatcaacagctgaatcaaccaagtggaagaaaggatatcagagtttgaggaccaccttactgaaataagacatgcagacaagaatagagagaaaagaatgaaaggaatgaacaaagcctccaagaaatatgggacttcataaaaagaccaaagctacaattgattggagtacaagaaggagacggggagaatggaaacaagctggaaaacacacttcaggatattatccaggagaacttccccaacctagcaagacagaccaacatgcaaattcagcaaacaccattaagataccccacgagaagatcaaccccaagacacataatcatcagattctccaaggttgaaatgaaggaaaaactgttaagggcagccagagagaaaggtcaggtaacctacaaagggaagcccatcagactaacagtggacctctcagcagaaactctacaagccagaagatattgggggccaatattcaacattcttaaagaaaagaattttcaacccagaatttcatatccagccaaactaagcttcatatgcaatggagaaataaaatcctttccagacaagaaaatgctgagggattttattaccaccaggcctgccctgcaagagctcctgaaagaagcactaaatatgaaaaggaaaaaccaggacaagccactgcaaaaacacaccaaaatataaagaccaatgacactatgaagaaactgcaactggtgtgtaaaataaccaaaaagcatcataacgatagtatcaaattcacatataacaatactaactttaaatgtaaatgggctaaatgccccaattaaaagatacagactggcaaattggatgaggagtcaagacccatcggtttgctgcatttaggagacccatcttacatgcaaagacacacacaggctccaaatgaagggttggaggaatatttagcaacaaaatggaaaaaaataaaaaggcacgggttgcaatcctagtctttgacaaaacagactttcaaccaacaaagatccaaaaagacaaaaaagggcattacataacgataaagggaacagttaagaggagctaactattctaaatatgtatgcacccaatacaggagtacccacaattataaaacaggagacctacaaagagacttagactcccacacaataatagtgggagacgttaacaccccactgtcagtattagacagatcgatgagacagaaaattaacaaggatatttgggacgtgaactcagctctagaccaagtggacctagtagatatctacagagctctctaccccacatcaacagaatatacattcttctcactgccacatggcacttattctaaaatcgaccacataattggaagtaaaacactcctcagcaagtgcaaaagaactgaaatcataacaaacagtctctcagaccacagtgcaatcaaattagaactcaggtttaggaaactcaatcaaaaccacacaatttcatggaaatttaacaacctgctccggaatgactcctggataaataataaaattaaggcagaaatcaagaagttctttgaaaccaatgagaacaaagagacaacataccagagtctctggggcacagctaaagcagtgttaaggaaatctatagcactaaatgcccacatcagaaagctagaaagatctcagatcaacaccctaacatcacaattaaaagagctagagaggcaagagcaactaatccaacagctagtggaagacaagaaataactaacatcagagaagaattgaagaagagatacaaaaaaccctcccaaaactcaatgaatccaggatctgttttttttttttttgaaaaaattaaccaagtaggtagactgctggctagactaataaagaagaagagagagaaaaatcaaatagacacagtaaaaaatgataaagaggatatcgccactgaccccacagaaatacaaactatcaacagagaatagtataaacacctctaagcaaataaactagaaaatctagaagaaacagataaattcctggatacatacaccctcccaagactaaaccagtaagaagctgaatccctgagcagaccaataacaagctctgaaattgaggttgtaattaacagcctaccaaccaaaaaaaagcccaggaccagacggattcacagctaaattctatcagaaatacaaagaggagctggtaccatttcttctgaaactattccaaacaattgaaaaggagggactcttccctaactcattttatgaagccagaatcatcctgataccaaaacctgtaaaagacaccatcacaacaaaagaacttcaggccaatatccctgatgaacatagatgcgaaaatcctcaacaaaatactggcaaactgaatccagcagcacataaaaagcttatccaccatgatcaaatctgcttcagtgctgggatgcaaggctggttcaacataggcaaatcaatacatgtaatctatcacataaacagaaccaaagacaaaaaccacatgattatctcaatagatgcagaaaaggcctttaataaaattcaacatcccttcgggttaaaaactctcaataaactagatatctatggaacataatctcaaaataataagagctatttatgacaaacccatagccaatatcatactgaatgggcaaaagctggaagcattccctttgaaactggtataagacaaggatgccctgtgtcaccgctcctattcaacatagtatttgaagttctggccggggcaatctggcaagagaagtaaataaaggacattaaaataggaagagaggaagtcaaattgtctctgtttgcagatgacatgattttatatttagaaaatcccatcatctcagcccaaaaacttcttgaactgatactcaatttcatcaaagtctcaggatacaaaatcaatgtgcaaaaatcacaagcattcctttacaccaacaataggcaagcggagagccaaatcatgaatgaactcccattcacaatcactacaaagagaataaaatacctagaaatacagctaacaagggatgtgaaggatatcttcaaagagaactacaaaccactgctcaaggaaataagagaggaaacaaacagaggaaaaacattccatcctcatggaaaggaataaacaatatcgtgaaaatggccatactgcccaaagtaatttatagattcaatgctattcccatcaaactacctttgacattcttcacagaattagaaaaaaactattttaaatttcatatggaatcaaagaagaccccgtatagccaagacaatcctaagcaaaaagaacaaggctggagtcatcacgctacctgatttcaaactatactacaaggctacagtaaccaaaacagtatggtattggtacaaaaacagacatatagaccaatagagcagaacagagacttcagaaaataacactacacacctacaaccatctgatcttcaacaaacctgacaaaaacaagcaatggggaaaggatcttctattcagtaaatggtgctgggaaaactgacaagtcataggcagaaaattgaaactggacctcttccttacactttatacaaaaattaactcaagatggattaatgacttaaatgtaaaacccaaaactataaaaaccctagtagagaacataggcaataccattcaggacataggcatgggcaaagtcttcatgactaaaacaccaaaaggaattgcaacaaaagcaaaaattaacaaatgagatctagttgaactaaagagcctctgcacagcaagataaactatcatcagagtgaacaggcaaccacagaatgggagaaaatttttgcaatctacccatctgacgaaggtctaatatccaggttttacaaggaacttaaacatttacaataaaaaaaccatcaaaaagtgggcaaaagatatgaacagatacttcttaaaagaagacatttatgtggccaagaaacatatgaaaaaaagcttaacatcactgaacatcagagaaatgcatttcaaaaccacaatgagataccatctcacagcagtcagaatggtgattattaaaaagtcaggaaacaatagatgctggtgaggctgtggagaaatagcaacgcttttatactgttggtgggaatgtaaattagttcaatgattgtggaagacagtacggagattcttcaaggatctagaaccagaaataccatttgacccagcaatctcattactgggtatatacccaaaggaatataaatcattctactataaagacacatgcacacatatgtttattgcagcactatttacaatagcacggacacagaacaaacccaaatgcccatcaataatagactggataaatgtggtacatattcaccatggaatactatgcagccataaaagggaatgagatcatgtcttttgcagggacatggatgaagctggaagccatcatcctcagcaaactaacacaggaacagaaaacctgacacaggaacagaaaaccaaacaccacgtgttctcactcataagtgggagctgatcatggagaaaacatggacacacagaggggaacaacacacactatggcctgtttgggggatggggggtctaggggaggcaacttagaggatgggtcaacaggtgcagcaaaccaccatggcacatgtatacctgtgtaacaaacctgcacgttctgcacatgtaccccgttttttattttttagaaaaaataaagaacctattctcttccacctctagtttcctccttttcctgaagaaattttagttgatgatgctattattcatcattcaccttcttccctgcttttactcacatccttatctcaccaggttcttactaagtccctcttcaaccaggacctgcgtttccatctccaaactatttgtttagttcagaccctctccttgaaccgtcacaatagcttgatgccttcatgcctcttttagtcttctgaatccctctaattctagctaatacattgttgtcaaaatatacttgaaaaatacacatgagatcatatcactcttcttaagacccttctgtggtttgttttggaacacagtctccttaacttggcattaataatgactttataatctgacctacgtttctatccagatttaccaaagtgtaggattcagaagtctgattccttcttccagtcatatcatttgtctcttgtccagttagctaacatctactcatctttcaggacatgtggtagactgaataatgtcttcctcaccctcctcccaatttccatgtcctaattcctggaacctctgaatatgttatattatgtgataaaaagagactttgcagaagtgattaaattaagaatcttggcttggggatattatcctggattatctaagtgggcccaatataatcacaagggtcattataagagggaggtaggaaggtcaagatcaacaggagacatgaagacaaaaacagaggtcagagagagagagtgtgttgcagatgttacacttctggctttgaaggtggagtaaggggccacggaccaggaatgcaggagacttcagattctgaaaaaggcaagcaaacagcttctcccttagagcttccaagaggaactatccctgccaaccccttgactttagcccagtgagactgattttggactttcgatcccaggaactgtgagataatccatttatattgtttgaagctactaagtttgcggtaatttgttataggagcaatccacaactaatacaagacatgaatcaaatgtgttaattttttgaagcttctcctcagcacactgttcacctccaccacagctgactcaggcgcccggtccccacagctccttttctgttcagctgtcatcactttgttcacagtattgtaactatttgcttgtctgtgatgcttgagggcttagattttaacctcatttgtctttacattagcagtacaatgcttggcaagtaggaggtgttcagtaaaagatgagcgactttctactataatgtgatacatgtcaattatcacagaacagaaagtttgaaagcatcttattaaatttattgaaatataacatatatacaggaaagagcacaaagcataagcttgcagcctgatggattttcacaaggtgagcacacctgtatgaaccagcacccagatccggagatagcactttatgggtaccccacaagccctctttgtcctctcacccttctagagaaggcttgacttctaacacccgggagcatgtgcagacaaagcacacgttttggtaagaattaggaattttgactaaaaactgaatctcccttttgatcgagtaagaatgaggataggaatgtgtgggactcataaaagttctctcttttggggcctccattccttcatttggaaaatgaggagatattcagttccttagttcacctcagtgtatgagtctaggacttgtttctgtgatatatgagttaatttgtgcaaaaaacacagatgtgatgcttcaagtttctatattattaatttaaattatacaaataatatgatttatctaataatctagaaaatgaatgtagcacaagggtaaaggagagatgatctggtatgattttctaaaactcttctcttttctcctaatccgttactgcatgtattttagaaaatgtgtgagaatatctgtttactttatcaagtaaataaaatggcagaaaactttccttacaaagagatgtatttcccgaaagggtcttagaggttgttgatttaagtctaatattataagtttcccctgaatttaaaacatagtgtttctatactattataaactttgagaactgaaggattaactctggggtctttaaataaaaatccatattaataagaaaattgatgatggtgattttaaatggaagatggtgattttaaatggaaaaagttgatttattattcagttgcttggagaagaaaacaaattctcttacttgttaatacatttgtcatttgtcagaagataagacatttattttaatatagtatttattattgaagaatttgccctagatattcacagattagataaaagtacctgagatatgatagtaagaaagttaaagtgaaaaccaaatacctaataaggaaatagaacagaaactgtttatattttaataagtagtattatgatattaattacatcaactttaactcagaattttgaaaataatctattctgaattttggcatacatttttatgagacaaaatataattattactcaacagatgataacaaaaagtactatttattaagtatacaatacatatcagaatctttacattaatttttttttgtctctatgatgctgtatatcaacctcaaaatggagatttttttgttgttattgttgtgtcttgcatgtaaggaaatggaagtgagattaacatcaaagtctcttagctaatccattctgaaatctgtatttgagtctagagactctgacttaaagtttaattttcttttcatcacctcaggcagcttcactttgatacatattatggttgataagcccctcattttacacattcttcttggtttgaagaaaaggcctttggcaataatccttttccttttcctctcactgcaagtcctatctagaatcagtgtcatgttggaatgcacaactcagaaggaaggcacacgccttgggagacacaataccatatcctggaattctaagcatcttttttggattcctgtaatgactaccacaaagattggcaagtttggaaaattagaacaaagcaaagtggttagacaaatctgctgttgctctgcaaggtgcctagtgaagacaggtgctgactcaaatgagtgagaaacacctcctcacagtctgctgtcctaggtggtatctttctacttctgctcacactcggaggctatggattaccttggaaatccatcaccaaaatgttggtcaggagaaatctagcctatccgacctgcttggataacaccacatattttaaaggaaagattgccaagcacttgcttggcaccactgggttagctttcaaaggaagctccttgggggagggaggttaatgcctggggagaagtaaaatagctgagaaaagcccatttagccgagtctttgtggcagtcagtcagagagtttatatttttcacttgattgtttttaaactagcttttctccatactatggtttctgattatttttgtaagtaggcctcacagagccatcatttattctgacgtcactgaatacttagattatgtagatggatttctgtgtaacccaaactagataaatgtatgtttttgatctttgggtctgtatttttggttctttgtctatatttgactataagcaaagagagtggctatgattctactttttgcaccttctgtgatgccaagagcttttttgtttctgacatacgaccctgggcaagacatctaaactctttggatctcatcttcgaaatggaaatagtcactgcttcatatattttatcaaaaagcttgtattacatgaaaactcttggaacaccaagaaggtcttggaggcttgcagacacaagcagtcgccccttccaccctgcctggcctgtcatgcagtcttcactccagcacagaccatgacatacctccatacctttcttcatgctcttgcccttgactcgtatgttttattaccaacaacaaagcatatagaagttaagaaaaattaaatagaagaggaagagaaagggaacttagatttcatgtcttactaggtattccctgagagacattcttaaaggatctacaagagtgggtcagtggtttgattgagctaaatgtttgaatttggttaaacataaaaatacatacagaaaaaattgactctaggccgggcgtggtggctcacgcctgtaatcccagcactttgggaggcccaggcaggcggatcacgaggtcaggagatgaagaccatcctggctaagatggtgaaaccctgtctctactaaaaatacaaaaaattagctgggcgtggtggtgagcacctgtagtcccagctacttgggaggctgaggcaggagaatggcgtgaacccaggaggcggagcttgcagtgagccgagatggtgccactgcactctagcctgggctacagagcaagactccatttcaaaaaaaaaaaaaaaattgattctattatacatttttgcaaagatgttttaatgtcccaggggaacaactgtaacttcctagctaaatttttaccttggtgcttgcatctgcatagaatctaaacaaacttaacaggtcattttgctcatgtttatggtatacaccaggatcagcaaactatatgggtcaaatttggtctaccagctgtttttgtaaataaagttttattggaatacagcccatgctcctttgtttatgtattgtctcttgctgttttcatgctacactggcacagttgaatagctgtgttagaaacccatggctttcaaagtctaaaatattgactatgtgactttttacagacaaggtttggtgaccgctggtatagaccaattccagttaaactgaacccatctatgttcttctgtaatataaggctacttgatttatatatagcctaatgtctaggattctaaatttctaagaatagccctggcttcatgggcatttggcttaatgctctactgttgccatgttggaataataattgttgaaaagggtcctgcattttcattttacataaggccctgtgcattatgtagttggtcctaagaacatatatttttgcaacattaaagatcaagattttctttaatccaaatgtgagggaaaaatgaattactatccctataactgtacttttttttcttttttcttttttctttttttgagacagagtctcgctctgtcaccaggttggagtgcagtggcgcaatctcagctcactccaacctctgcctcccaggttcaagcgattctcctgtctcagcctctcgagtagctgggactacaggtgcccgccaccatgcccggctaattttcgtattttttttttctttagtagggacggggtttcatcatgttggccaggatggtcttgatctcttgacctcatgatctgccctcctcgacctcccaaagtgctgggattacaggcatgagccaccgcgtccagcccctacaattgtacttctatataggttaccaactttggcaaataaaaatgcaggatgcacagttaaaggtgaatttcaaataaaaaacaagcaattttttagtataagtatgacccaaagattatatgtattttgtctgttaattctacttctacccaactggtaaaagctctttagaggtaataataaagaactcattttaaatatctacactgcagttataggacatgccacagaaattattttaataaccaagtaattcatgagattaaaaatcccctccttgcattttcactttcttgttagcgttggtcttggctgaagattctaatgcttatcaattcatattttctgataaaatgttcaaatggacctaaaattagatattcgttcagcatcccttttccagttatccccggtctagatttttagaccattcttcccagagctgttaaattgcccctcctatctaagcagataaaaaaggttatgaataaaacaaaaagcagactgagcaagtatttaaaagggcagagactttataattactataaaactaggtgattaaatgttgaccagatgttgttatatgctattttgaggttaaaaacattgaagttgtaatattttgctaaaacttaaattgcatagaaataaaggggaataaatcaagggtagttttaaagaaataatttataaattagttctatactaaggaaattaataagtgaacttgtataagtacaatttcattagtatataggtaacattaatttgtatatatttacttaagtattaggctgatgagtcatatagatcaataattccagaaatttatcctcatggttttttccatgtaagcagaatagtcacaaaaatatatttctgaggtaaaattagaagagatagtctatttttaaaatttttaaaattagtaggttatcaggatatatgtaggcatgtcatactcttttaaacattccctgagcaaggcgtatgccaaacctttctttatgtgttgtgtgctgttttctttgagtgatacaatttaaagtcatacggtaattcatacactgacagttcatgtgcttcatttcccttttaaaggtgaagttaataacctttaaaatgaaacacagtactcaatgagaaatatttttttaatcaatcaaattgtatatatttacttttctaaaatcacttaaagataaaaacgtttgggaagtacctttttttctaaggcatgattgattattttcagatctgacaactcaaaagtgtttatgaacatgtcattatatttcattttactttgagacaaggtctcgctctgttgcccacgctagagtgcagtggtgcaaacatggctcacagcagtctcgacctcatgggctcaagcaatcctcctgcctcagcctcctgtgtagctggaaccacaggtgcattccaatgtacctagctaattttttgatttttttttttgtagagacagagtctcactatgttgcccaggctggtattgaactcctgggctcaagtaatcctctctcctcagcttcacaaagtgccgtggttataggcatgagccaccatgccttgcctaaacatgtcatttttcctttgaatttagaaatacatatgcatggattttttttttcataaaataaaatcctaagtagttagagagtaaaaaataagaaagttcctatatatttcacattttcaatcatgcatacaatgaaaaaagccagttgttttcctgcatttttagttaaccattaaggatgttaatttccttcataacacaggccatattagtttattctactataaagtggatagcttttagatagggacaggtactagaagaaagagagtctggatacttgtagggtttgtaagttatttccatgtgactgaaacttgataaacatttactaatataataggaattcctttttcaggtgtaggcataatatagattcatcttaatgaccccacacatattgctgccatataatcttttcacaatggctactttattattttattataacaaaatttcagcacattgataatattttaatggtgtataattgatgtattgggggtgtgggcagtaaaatattttaatagtacatgattgttgtatttgggaatgtggaagtgtgaaaaaaattaaacttcatgtggaccctagaattgactttgctcttcccattggtatttaattaggatctttatgttgaaacttaacaaaatttcaacagagtgttgctgggcaacctttagttgccttgaaaactcataatgaaggttgaaaatttcaatatatgaagtatttgtttaaacttttcattcttactttctctgaaagacgatacatttagagacttgtagaactataagtgaatgttgctatgttttgaactatgcatagtcttgttatttaatgaaattagtgtagttgaaatatgaacttaaactatattttatagtcattgttgctcatgaaggactcaaaataagacatgaagctagactgagagaaatcatagcttacccgggaatctgtcttcattcattcaacaaatatttatttatttaatgactactatgtaaagtgctggggatacaaacatggatcagatatttctttcccgaagaagttcattgtatggtgggtaacagatatttataattaagacttagaaataagatacacttataaatatgacacaaagggtgatagaattatgcttacaatatcttgtgaacaccctggagtggcaatttcccagtctaggtctagcaagagtgatctggcaaggcttctgagatgaatttgtaacttaactgagttgtaaaatataaaaataagttaaaaagtagaagtatatgggagaaggatttcagatagaggaagctgcaggagaaaaggggaaggaaaaaagaacatgatattgtgatacacgacatttactgttttttctgtgaccttgattctctggcatctcgggccttgatcctggagagattgcccctcccagagctagctaattcctagagatagcaaatgaccctcctgcaagtacacttttcatatacacacaagccaaacaatgcagagcccatgctcctaaccatttcctttatcaaactctcttacacatcaacctaatattctcctgccctaaatcaccccaggaccaggtatcagacaactagggacagttcctatagcccagagtcctgcaaaattattcaagctatccaatcctaagcttacttagtgtacctaccctgcctttctcattccttttcaataaatagccaacaaggatttgggccatgctctttcgtctcacctcctgacctaccctggtcattccccacatggccctgcatggtgtgcagtgtctactgtttctagggatctgtgagtacggacttcttccttcatgacagtcatttttgtgtcagcatgtcttatatctgattaaaacaaaccctaagtacactttgagaacagacatcataagtaattcagggttaaaacaaaatgtgaggtaaggacaggaaagaaacagggatagagagccaggcagaggtcagattgcacaggacaaagaaacttgaccttaaataatgtgggcagatccatattaatattgttttaggctacatatttttttggtccctgtgtgagtaatgccattattttgagtatctctgaagagttttagtttggtcatacataatctccaaatctcctatcttgtaattgacgttgctgacaggtgagaaagtattcttagagaccggagaatagtaccatctatgcgtcttttttcttttctttttcttttctttctttttttttttttttagagggagtctcgctctgtcgcccaggctggagtgcagttgcgccatctcagctcactgcaagctccacctcccgggttcacgccattctcctgcctcagcctcccgagtagctgggaccacaggcacccaccaccaagcccggctagttttttgtatttttagtggagacgggatttcaccgtgttagccaggatggtctcgatctcctgacctcgtgatctgcctgcctcggcctcccaaagtgttgggattataggcatgagccaccccacccggccgtgtcttttttctaatcatctttatattctgcaaagtagatatttacacttttgtaacctctaggagaacaaataagtggggagtagtgtcagagaacccttcttatttctgattcatcaagggctctgtgttaccatgactgacaagacaaattgtgacattcacaatatgttattattggacataaaaccatattttttcaaaaaatcaggaaaagcaattcatcaaatccaatgaaaatatgttaccaagtgaagctagataaattagatttgcattgctttaggagtatacatgtctcacatagaggacctataatcatttgaaatgatattggcaaatgctcagggacagctatgtcagattcttcaggaattcattctcactatggaaatggctttcagacctgcttgtaatatagaacatagaatgctatagtacgctgtcctaacatggaatagaaatgaaattccaggcacatctgtcgtttcttattttctggaactctcttcaaaattcttgaggagaaattaaggtgatgacttcctcttggaattttgcattgttgggtaaattacctagaaactgatgaaaataatatgcaatttaaaatgtccaattaaaatcccttagaagtaaaatatattcaaggtttaatgctggttactgtactaacttatgtgcaacaaaggaattttgaaatatctttaaactctggcataatgtggtatgatactgcccactgaaattagtgatcttttaacctgccactggtaatatgctaagtttttcctctatttttatatgtcccattgtatttagcatcatctaaggattttaaaatgcactatgaacttgaaatacaactttccacttgaaaccgggtaaagtctggctttaaatggagagtaagcctagcctatttagatacccaagtgacagttcagaagcttgtggcttagttgtcctgtgagcccctcacacacttagatttatgttctataaaatcatgcctgccaggcttgcttcattgagaaccaagtgtgtcagcagatgctgaaagccagaaatccctatgcaaggaaaagcatttctaactttttaaaaatgaaactcagtatttgattagtgtatatgaagaccatttgtattatcctatatgctgtcataatcaaaaggtttttctgaatatattgtttcagaaaactgttgttaaacatccctgtctatatctactttctttttctaaatgtatatgaatgtgcatgtccatgtccatgtctatatgtatacatatatctaaatctacatatctattaggggagataggcttagaaaacatttatggagaatgtattggagagagagttaatatcaaagcttgtgtcagtgggcaccaatagtgcactgccttttggaaatattccctattactcttaaatgcatctaggtaattaatatgttgatgttttattagtacctattgagcataaagcttttaaaatagcaataagtgatatattcactctctcgttatgttaccgataaaatatggaaaatgtgttggggggcgggtcccaaagaccaccactgagtgtgatgagttgctaagaggactcagagaactcaaaatatagagttacattcgcagttaggatttattatagtgaaaggctgcgaagtgaattagcaaaagaaaatggcccatgaggtgaaattcaaagggaaccacacacaagctttcaggagtcttctctcggtagagtcacacaggacttgcccatttcctacagcaacagattgtgactacatgtctaccaggaaggctcactgaaaactacagcccaaggatttattggtggctagtcatgtaggcaccctgtgtctgggatgtacaaaaatttgagacttccaggaggaaagcaggtattcagcataaaccacattgttaatacaaacagttatggccctctcatcagtcctgacaatggtagaaaccctctccacctccaagtttctatactccagctcagggccaaacttccaagcacggatttctagggataacagcttcaggctgctgttaactcttttctgcacagaaaacgaatatattgacctatttggattcttgcatgagtattaacattattttttcccctagggtattaacttactttagcagttaaatttacacactaattgagaacagttaacttcaaggttcctttgggccaactaaacatctgctgtctataaattttagattactgcaaaataaataagatttaattttcattgcaatagagaattgtatttaagatgttatttctgtaaatgaatagtaaggctagtctcattcatcttggataatatttttatacttccatttcagaagatgagattctctgaccttattttctaattttgagggaaaacacaaactcagatttatcaaatcttgtgcatagattatgttatcttaaatttggggagcaaagaaagggaaggtatacatatgcttgtgaattaaatcaatagcattgatattgggttattggtgtttgatcgtcaatatatctaccttctttaattcattcctcatactgacccggtgtaatcattaaaacacaaatctgataaagtcatgcttaccccgaagctcttcaatggttgctctgattttcagtctctcacattctctatgcttcctctgccactgtgtctttgctagtccctctacctggaactctgttcccttccttttttacctagtgcacttctactcattcttaagctttcagttaatatatcacttccttaatatttctgactgtctaggactgattccattagaactgataggttcatataacatattaacatacttttcttccccggcatttgtcacagttgaaaatttacatttcttaaaatggcattgataatatctgtctttcccattagactgacaactcctctgtattcttagtgtctagcagaattccaggcccatagtatgcattaaataaatattttttacatgaaaacattgaaacagtttcatttgttcagtgcactcagatcattagaactgaggtagggttccaattcctacatttgatatttcggatcataaagaacggcaactaagctcaagaaaggtttacataaaaactagggtatgtctaagtcaccctccagaggaaggatggacatctctcccacaaatttggttcaggtgtcaagattgatgatgccacacatgccacaagagggtatgaaaggcacattatttacataatgagactttctggggagagcagggcatgtttctaagcaggtccaagactgccatgaaaagcagggaaaagagactcgcttgggattttactgtggttagggggttggggcaaagtgagaattcttttatgtattggccagggcttgtgtgatttgaacttcctgttgccaccagaggagggagcatctgggctttcttattagtttgcccagatgtggtgcagaggaagaagagggaggggtgagatttggggataggggaggctactgcctcctgcaggtggaaatggcccgaggttccgggtttgtctttgtagcaaggaggcctcagtggaagtgctgagctttccaggtgctgttttcatgacccaaagcataatgtgcaagtgggtatgtggagttgagggctcaggccctgtgagagcctccattctcaggagagcacagaatgcagccagcaatgctgttctaatggtgtgtagtatggtgccgaacaggacaatgttcacaggactcatcacagagtccatacgcaagttatggccattataggtgatccagatgttccaggagacatgagaggaggtttctaaaatgaagaagtcttgggggagggaggcactagggtgaatgccagctgtactgcaaatttgggcagattctagaggcttctgttgtaaaagggggcctcattaaaggggagctgatatgtaacaccctaaatggtaaaatttaaaatttggtaaaaagtaagtttaacatgataaaaagtaaaatttgtaatgcagaatatgttgcctccagaatccacaaggcttaaaagatgttgagcatgtgggtattgagggtcaatggctgtttcttgacagtgtcagggatagagtgattcttgacttgctaaataattttcaggaatttaaccaaggtgatgaggccttgtactgtgtgggggacaatggcacattttttctttgtgaacttatttgtgaatgtttgcatgtactgaataagtgtgtgaactgactctccttagaggaagatgtcatcagcatgatgaaattcctctgctcctggagaaggttggatgaagtttagaagttgccttcaaacattgtgtgtaaaagtctattagggggtgcatagatcttctggaggcctggaggaccagtcaagaacaaaatggacttccacttcagtaggaagaggctggacattgctttccacctattttgggattcttcacaaagacaaaggtttatttttatttttaactggtctgcaaaggctataaatacaagctgtactgtattatgaagtcttagtctttgcttgggcaccatgcagttgcaacagagacctcagctgatcccatgggtatctgtgaagttgcagtgaccctaaggcgatgccccaagttaaggcaaagtgtggaggtggtgtgaaggctttgtaccttgcattgcacagtcactggggaagaggagtaaccttgggcccagaagctccttttagcagagggccatttttaggaaacggctcagctgtgtgctgtcagtaagcaaaactcctggcatttggataaatgagtgccttagtttagaagagaggatttgagtgttgtatagcatcatcctctataaatgaagaatatatgtattagtctgttttttcactgctataaagaaatacctgagactgggtaattaataaagaaaagaggtttaattggctcacagtttcccaggctgtacagaaagcatgatgctggcatctgtgtagcttctggggaggcctcaggaaacttccagtcatggcagaaggtgaaggggaagctggcatgtcttacatgtctggaagacgagcaagagagtgaggggcagatgctacacactttgaaagaaccagatctcaaggaggagcaagagagagagggggaggttctatgtacttttaaacaattagatctcacaaaaagtcactcagtagcacaagaacagtgctgaggggatggtgctaacccattcatgagaattccacccccatgttccaatcacctcccaccaagtcccacctccaacactagggattacaattgaacatgatatgctgtgctcagtggcttacgcttgtaagcactttgggaagccgaggtgggtgggtcccttgaacccaagagttcgagaccagcctgggaaacatggcaaaacctgtctctacaaaaacaaacaaacaaacaaacaaacaaaaatcagccaggtgtggtggtgtgcatctctagtcccagccactaaggaggctgaggtgggagaatcgcttgagtctgggaggtcgagcctgcagtgacctgtgatcaccccactgaactcctgcctgggcagccagggagacagagccagaccctgtttttataaaaaaaaaaaaccaaaaatatacttgaatatgcaatttgggtggggacacagatccaaaccatatcaatgtgcctcctttattgtctataaatatgcttggttactgcaatttctacactgccttgtttgctgcataagataaattagcagagtagccatccgatgtggctttttcctcccacattttgaattactcctgtcaagccagtgacctgtaaaagccaatggcatgctgggtggcattgttcttgaggtgattgctcaggatttatacctcctcacttctgtttagtttggtcctagcctgttatcacttctccattttgtctttctagcttcacactgaattttaatttctaaacctctccttggctgtctgtctgtccctgactgatgggcacttcccagccgccttctattcgggagactgtgggctagctcagtggactagcctaagtgacaatttaagctagggaaaagggagaacgtaccaaaagatgttcattggagaggaaaatgatacagaaaataaaaataataattctctgtcattagtcaaaacattctttcaaaagccccttatgttgttcgacaattgagacataactgaatctcctgaacatatttaaaggttatagagagcctagagtttgggacagaaataaatgagataaaataaacaagagacttttgccctttgccttgatccaaatgctaaaatgctagttagaaacgccatacaaatatattaggctgtacgtcattagaagaaacctaaaatattattgtgtttactgttaaaaattacttgtaaaattttgaacttgcttttataactctaaacacaagtgaagttcaatgtaaaaatatacatttccttctaaatatcagccagttaatcatatatgtatataaatgtggaaaatatgcttctctctctttttatttaaattcttaaattcttcaggactaaataaaatttaaggaagagctgcttatggcatcattgcccctactttcctgcctccatccaatctccatattattcctacactagtcttatgttttccaacattacagattactcaattcacaatatgcagaggtcaaattagtatattgtcaacctcattttttttttgttttgttttgtttttactctggatgacgcatttagcatgagtaactctcataagtgattaatgatggctccatacaggccagtcatttaatgctttatttggactttatttttgttgttgtgacatttcaaccaatcataaaatgtcacagatgaaattaaagcaaactaagattatatagcttaacattttatttagttttgggccatattaagatgcctttgtttatacagttttctcctacaatgagttttataattgatatcttaaaatagtaaatgtaactcaatgtatcataacttacttaaattggatgtggataaaatgtgtaaacatacgcttggcaaaagtgtgtgcagttttatgttgtaagattaagtaatatattgtaattcttatacacatttctagaaaagaaaatattaaagcaaataatttattatacaaagcacttatctgtagacggttttcaatagatggttgttctcttcttaccagcccataactataacttgctttggtttatgttaacagatattaaagcaacttgaatgtaagaatattgatattatacctgaaaaatatagaatatttttcttataaaagactgaattattttaaagtcttcaaagttgtctactaatttatgttactgtcattaaataatgaccttatcattaaataaatgaccttactctaagaggttaagtgttacttgacagcctttttaattatttcaaaacaataagagatatatttccatatttccagaaataatgttattcttataagaagtattattttaaaatatccattgcaagtaagctaaaagaataaattaagaaaacattgacattgtgagaatttatggcttattctgcttgaagcattggattgtgatttgagtttactaggaaaatatcccaaatatcctccttttcttcctttattttacatagtactggccaattagaaaaaccaaacagaaatctttatgctgctaagtgaaatgagtgtttgtacttgtgactcaagtttgtagtaatgtgctttactttggaatttaagagtttggttgtgcaagagaggatgtgtgccaattatgcctgcagaaaggggcaagtctgagaaatctgcccccaataccatggaaatctctctctctctctctgtctctctcaatctctttttgggaaaaaagaaagacaaagaaaactatggagacaaagagaaagggtttaggtttgcatgtgtgctcctgaagtctatcaatagaaacaggaacgtggggaagtcggagagatgtatggataaaaggaagaaaggtaaacattatgtctggggcttttgtgtcatgatgaattcctccctacaagaagagttggctggaagccctgggtaaagccgcttccatttccagcctccttttcacttatctctactattgagtttatggttaattatttttacaaatcatttccctcttgccctcttccctacaaatcagttgctaagtgactgggagatagagtgacctccgaatttattctgctcattatatcgttagatttttccatatcacttaagggatggatttgttcatgtaagttcagcacctctccaggattcaagatgacatttcacctaattaatagcccctattggcctagttattttgaggatgtgtaattaaagcaatgatactacttgttcagaggaattaagattttattttgccttttaaattaattgcccaaagtgtttttttttttttttttttgcttaagtcttattattatgcccatatgtgttatgataaacatattttgaaaggccatccttacaaaaatttaaaatgttgaacttttaagatttaaaaataagcctaggccaggcgcggtggctcacacctgtaatcccagcactttgggaggccaaggcgtgcggatcaccatcctggctaacacagtgaaaccctgtctctactaaaaatagaaaaaattaggcgggcgtggtggcgggcgcctgtagtcccagccactcgggaggctgaggaggcagaggttacagtgagctgagatggcgccactgcactccagcctaggtgacagcgtgagactccgtctcaaaataaataaataaataataagcctatatatatgtacaatattttaatctaatgggaatttcttaaaggcactaattttggccttttatttttgagttgtttatttttgttcacaaagtcctcagtatagtgcctcactcagaatagatactgttaaatatttatagaattattcattgaatcagtgtgatgataattggaataaactttcttttaaaaatgtttaatattaaacatgactatacatataaataattctacttctctttataagtaattctaaataaaaatcagaatgattttgtggacaacattccattgctatttttaatttgaggtttgcagtcaatatgtatttatcttctgtgatgtgaactgttatttactgatctatcaaaattatatatataagcatatatatagcatttaccatatatgagataatgtattttatgctttacaaataggtatcttattaatgaggaatcattaaggaaaaaaataccatcttttctttccagtaactatttagaaaaaaagaccatgtataattcacatgtgtacatatacaaacctagcaatgattaaagatgtggagaatacaaggacgttacatgctgagtattctgtgtgtcggatgatggctgtggtgatggtatatagggtttcttgcagtaaccaaggagctgagttgtatgccagttaataggtataatgacaaaatgcattgagaaatgttgaaggaaaagatataactaggcaaaaaataacagtttggatacttcacctgtgtaaatgttttttgtgattgttagtgaaacctgaattggtagtatctgttgaaccaatttaagaatattttattaattttacaaattataaggatgacagaaaaaatcttatttctctatattaatacaattctgtatagaatgttttagaaaaataagtgaaatacttgtgtctaggttcaggctccaaaatacatgaattttaggaagaactaggggagaaaatgtcaattcctaagaggcaatttttaagatgtttcaagtgtttgctggccaaattttggtgagaaatgtaatgtgtgtttaatgaatagcatttgggcatttagatctgactccttattgcctcatggatgagatgtataaattttgaaagtttcctaaccatttaccatttagacctctggtttctctatgaaaataagttgcttatgtgtttactatgttttcttttagttcaaaatacctgaatctgttattctttcacgtgctgtaataatatttcaccttattaaaaatatgcatttttcattatgaaacaaatatacataaaagtagagttattaatgtgcatatttctatctatattttctaaaactatatttgtaactatatttgttttaaaagattggggacatattgtaatactcttttgttaccaattttttccattttacaatatattatgaacatgtatctgtgtcataatttataaatagctaagtggaattatgttctaacaataattacttcatcattttctttttattgaacatttagtgtttctattattttattataaataatgctgtggtaaacattattagggattaatcttatggattaaaatatagatatttgattacttctttagtagaagttcttaggtatggcattgctatttaaatcttaaatacattgtttttctttcaactttttctgttatggcaaaatacacagaacataaaatttgccatcttcaccatttttaattgtacaattgagtagtgttaagtacattgatcatgtgcaactatcaccaacagtagcatgtcggaatttccttcctttttaagggtgaatacttttctattgtgtgtatatatgtggctatatatatatatatatatatatgctatatatatatgtgtgtgtgctatatatatatatatagcacattttgctaatctgttcattcctggatggacatttgaattgctttcatgttttagctagtgtgaataatactgctatgaagacaggtgtacaaatatctttttgagaccctgctttcaattcttttgggcatataaccaggcatgggattgctggatcacatggtaattctatttttcattttttaaggtactgctgtgctgttttccagggtggctgtactaattttcattttcaccaatagggcacaagggttcatatctctccacattctcaacaacgcttgttattttctgtagttttgattgtttggtttttaattttttttgaaataatagccatcccaatggatgtgagatggtaacttgaatacttgaatagtttttctttttgagatggagtctcaatctgtcgcccaggctggagtgcagtggcacaatctcggctcactgcaacctccgcctcccgggttcaagcgattctcctgccccagcctcctgagtagctgggactacaggtgagcaccacaacgcccggctaattttttgtatttttagtagagacggggtttcaccatgttggccatgatgatcttgatctcctaacctcgtgatccatctgccttggtctcccaaaagtgctgggattacaggcatgagccactgtgccctgccaacttgaatattttttaaaaaaattatttagtgttagtttctacgtattttggatttgaatttctttttatctgtattatttgaaaatattttctcccactccacaggttgccttttcactctattgacagtatcctttcatgaacaagttttaaatttttatgaagtccaatttgtctatttttgcttttgttgcttgtgtctttcatgttatatccaagaaatcattgacaatccaatattgtgaaggtttgttctatgttgtcttataacagtttgattgtttttgctcttacatttagatctttgatccattattggttaacttttgcatttgttgttaggtaaaggtccaacttcatttgtttgcatgtgaatatacagttttcccagtactgtttgttgaaaagactgtcctttcaccattggatggtcttggcatcctggttgaaaattaattgattgtttatgccaaggttttttctggggttcctattctatttcattgatctatacatcagtctttatgctagtactacacagttttgattattgtagctttgtagtaggttttgaaatcaggaagtgtgggtccttccgttttgttcttttttcaaggttgttttggctacttaagtctccttgagacttcatatgaattttagggtggatttgtctgtttttgcaaaaatcaatgtgattctgataaggattgcattgagtttgcatatagctttggctagtattgacatcttaacaatattaagacatccaatctatgaacatgagatgtctttctattttttatgccttttaaaaatacatttcagtattttttctttagttttcattgtacaagtgtttttccttcttggttaagtcaattcctaagtatttcattctttctgatgctattgtaatttgaaatgttttcataatttccttttcagattgttcattgttagtgtatagaaatgcaattgatttttgcgcgttaactttgtatcctgctgctttgctgaatctgtttatcagttctaacagttttttttttttttttttttttttaaggaatcttaagggttttctatgtagaaaatcagattatctgtgaacaaatataattgtactttttcctttcaaatttggatgccctttctttatttccttctttcctgtttttttccctaattgctctggctgaaacttctagaaatttgttgaatagaaggtgtaaaagtgaacatccttaccttgttcctgatgttagaggaatatcttttgctctttcacaattgagtatgatgttcacgatgagtttttcatatatggttcttattgtgttgagatagtttcattctatttttagtttgttgagtgttttttaaaatcatgaaagggtgttgaattttgtcaaatggtttttctgtatcaattgaaataatcacataatgttttccttcattccattaatgagatatactacatagattgatttttgtatgttgaaccatccttgcattctagcaataaatctcacttggtcatagtatataatccctttaatgtgttgctagtattttgttgctaagagtttgtcaatattttattgaggattttcccatcaatattcacagggatattggtctgtggttttattttcttgtaatatctttgtctggcttttgtttcagggcagtgttggtctcatagaatgagtctgtaagtgttccctcctattcaatttttagggaaagtttgaaaataattggagttagttcttctttgtatggtagaatggtagaattcatcagtgaagccatcagggtcagggctttttctttgtcagaatgtttttgattattgatttaatttccttgctagtaacaggtctattcagattttgtgttttttaaattgagtctgtattagtagattttgtgtttctaggaatttgtccatttcatttagttcaagcaatttgttggcatacaattaatcacagtaatctcttattgtcctattcctttttttagaatttgtactaatgtccccactcatatatccactttcatttctgatttcaggaatttgagtccttcttctttatcttactaaatccagctaaagatttgtcaattttgttaatctttttaaaaaacaaactttcgatttcaacaattttcttttttgcttttctattctctattttgttggtctctgctcaaatctttgttattttctaccatctgtcaggtttgagtttaatatgttcttctttttctaattccttaagttgcaaagttaggttgttattcaagatctttctctcttttgtattgtaagcatttgcagctctaaatttctcccttagcattgcttttgtggtggcttataggttttgttatgttgtattttcattttaattcatctcctagtatgaatttatattttcccttatgacttcttatttgatccattggttgtctaaaagtgtttttattaatttctacaaatttctgaattgttaagtttttctctgttattggtttctaacttcatactgttgtgaccagagaaaatagtgtattatatcttggactaacatatggcctattctggaatatgtcccatgtgcacttgagaatattgtatattgttttgaggaagacggttctgtatacgtctattagctattgttcatttattgtgctgttcaagttctctatttctttacatataatttgtatttgtatggttgttatatttactatttagaatagcatgttgaagtctccaactactgtcgtacatctgtcaatttctccttccagtcttgtgaatttttgcttcctatattttgatggtctattattaggtgaataaatatttataattgttatatcttcttttatattgaatgctttattaatacagtgtcctgtttgtctcttgtaaactttttttgatttaaagttactatgtctgatgttagtataaccatccctgttctctttatggttactatttgcatagaatatcctttttagtttgttttcaagacagggtctcactttgttgcccaggctggagtgcagtggtgtaataatggcccattgcagccttgaattcctggctcaagtgagcctcctgcctcagtctcctgagtagctaggaatacaggtgtgcaccaccatacccagctaattttataattttttttttgtacagacaaggtcttgatatgttgcccaggctggtcttgaactcctgacctgaagagatcctcccacctcagcctcccaaagtgctagatgcacaaatatatttttccatcctctgactttcagtctatttctgtctttggatctaaagcaaatctctcatagatagcatatagttggatggtgttttttttttaaatccattctgcccatctgtcttttgatagaagaatttaatctacttacatttaaagcaattaccaaggaggaacctctgacattttggtatttgttttctgtatgactcagagcttttttgtccctcatttcccgcattactgtctttttttctttctttcttttgtactaaaacattttaattcccttctgattttcttttgtatagattctataactgttttttgtatgtgtctagcatggggaatacatttaatatgttgaagttgtagcacaccaatttgaatttataccaacttaacttcagtaacatacaaactctgcttttttccagctttgtccttaatccctttatttagttattgatgttataaattacatttacattgtgtgtgtccaaaaacaagcagttcttctcagtgcattagcctcttaaattatgtagaaagcaaagagtagaattacaaatgattattgcaataatactaacttttataattatctatatattttcctttactgagtttttacttcctcatatagttttgagtgtcctttcattttaacccgaatgactttatttagcatttcttgcaaagcaggtctagtggtagtgaattctttcagcttttatctggaaatgtcttaatttctttcctacttttgaaaaacagttttgttaaacattagattcttggttgacactttttttcttttagcactttgaatatattagcccactcccttctgccctccaaagtttctgattagaaatctgctaataatcttattaagaatctcttgtatgtgctgaatcacttctttctcactgctttcaatattctctctttgtctttggctttcaacattttaattttaatgtgtcttagcatggggtctttttgattcatccaacttggcatttgttgagcttcttagatgtttatatctttcatcaaacttgggaagttttggcaattatttctttatataatctttctacccctctctctctcttcttcttttgaaactccacaatgtgtaagttggttcacttaatggtgttccacaggttgcttaggcttcgtttaatttttctcaatccttctttctgttcttcataattaataatttttattgttctgtcttcaagttcattgattctttactctgctgctcaaatcttccttggagtttgtctcatgaattttttttcacttcacttcttgtacttttcagctctagaatttcttttttttcctttttaggatttttctttattaatatttttattgttaatatgttattttcttgactttttgcatgtcttccttcagttctttgagcatctttgaaagaattgttttaaagtctttatctagtagttttgccatctggcctttctcagggatcgttttctgtctatttttttctttgactgagccatacttcccttttttttgtatgacttgtgacttttgttgaaaacaacgttattccttttaaagtttttaattttcatgagtacatgagacataggtgtacatgagatatttgatataggcatgcaatgcatacaaatcacatcagggtaaatagggtatccatcacctcaagcatttatcctttgtgttacaaataaagcaattataaatacttttagtttcctttaaatgtatataattattattgaacattaaattattatttaaccagatttttcaatttttttctaatagagtcgtttgagctccttatatattctgttattaatactttgtcacatagatagtttgcaaatattttctcccattctttgggttatctcttcacttcatggactgtttcctttgctgtggaggagtttttaacttgttatcctatttgtctatttttgctttggttgcctattcttgtggggtattactcaagaaatatttgcccagttgaatgtcctggagagtttccccaaaattttcctatagaacttttatagtttgaggtcttacatttaagactgtaatctattttgatttgaattttgtttattgtgagagattagggtctagttttattcttctgcatatagatatccagttttctcagcaccatttattgaagagactgttctttccccaatgtatgttcttggcagctttgttgaaaatgagttcactgtagatgtatggatttgtttgtgggttctctcttttgttccattggtctgtgtgtctatttttatgccagcaccatacagctttggttactatagctctgtaatataatttgaagtcaggtaatgtgattcctccagatttgctcttttggcttaggacagttttggctactctgggtattttgtggctccatatacatttaggattgtttttcctgtttctatgaagaatgtcattggtactttgataggaaatgaatcatatctgtaaattactttgagtagggtatagacattttaacagtattgattcctccaatacataaacattgactatttttccattttattgtgttctcttcaatttctttcatcaatgtaaaaactgaaaatttgaatctactaatatgataactatggaaatcagattctccttctatcccatcgtttgctgtttttaaattttgttttgttttgtttctgattggtgtgggctttcttcatactgaggattagcctagaaattgcgagccttcaatagactccagagttccaaaatagttacctcatgcaaattctgtcagtcagtgcaattgttgtctaggtagggaggcagattactggtgcttcctacttcaccttttattcattagcagtgttttaaattttatatacgtgaatacatcagtactgtcattttcatgtgcttcttaaacattgctttagaaatgtatccatattgttacttttagattcagtttattcacttcaagtcttgtattttctttcatgaatacatttctctcatggtaggttgttaattttgttgactttttgctattaaaaactgagatataatgaacacgatctctccttgcattttgtgtcaagtttctcagtgtagatacatacaagtggaaccattgatttgtttagttcacataccttcaaccttaccaactattgtcagtttgttctttaatattgttgtataggaacaagcaattagtgtcttatatactaactattgtattaatcttcttatttccctataaagttgacaacattaggtattatcagatactattgatttgtcaccagaaattcttaattattttattgcttaaaataattggtggttgctattgcaatgtctatctaaacaatcctgcaaacagggacaatttgacttcctcttttcctaattgaataccctttattttcttctcctgcctaattgccctggccagaacttccaacactatgttgaataggagtgctgagagagggcatccctgtcttgtgccagttttcaaagggagtgcttccggtttttgcccattcagtatgatattggctgtgggtttgtcatagatagctcttattattttgagatacgtcccatcaatatctaatttattgagagtttttagcatgaagtgttgttgaattttgtcaaaggccttttctgcatctattgagataatcatgtggttattgtctttggctctgtttatatgctggattacatttattgacttgcgtatattgaaccagccttgcatcccagggatgaagcccacttgatcatggtggataagctttttgatgtgctgctggattcagattgccagtattttattgagtatttttgcatcaatgttcatcaaggatattggtctaaaattctcttttttggttgtgtctctgcccggctttggtatcagaatgatgctggcttcataaaatgagttagggaggattccctctttttctattgattggaatagtttcagaaggaatggtaccaattcctccttgtacctctgatagaattcggctgtgaatacatctggtcctggaattttttggttggtaagctattgatgattgccacaatttcagatcctgttattggtctattcagagattcaacttcttcctggtttagtcttgggagagtgtatgtgtcgaggaatttatccatttcttctagattttcaattgtatatctagaaaaccccattgtctcagcccaaaatctccttaagctgataagcaacttcagcaaagtctcaggatacaaaatcaatgtacaaaaatcacaagcattcttatacacgaataacagacaaatagagagccaaatcatgagtgaactcccattcacaattgcttcaaagagaataaaagacctaggaatccaacttacaagggacatgaaggacttcttcaaggagaactacaaaccactgctcaatgaaataaaagaggatacaaacaaatggaagaacattccatgctcatgggtaggaagaatcaatatcgtgaaaatggccacactgcccaaggtaatttacagattcaatgccatccccatcaagctaccaatgactttcttcagagaattggaaaaaactactttaaagttcatatggaaccaaaaaagagcccgtatcgccaagtcaatcctaagccaaaagaacaaaacgggaggcatcacgctacctgacttcaaactatcctacaaggctacagtaaccaaaacagcatggtactggtaccaaaacagagatattgatcaacggaacagaacagagccctcagaaataacaccgcctatctacaactatctgatctttgacaaacctgagaaaaacaagcaatggggaaaggattccctattgaataaatggtgctggaaaaactggctagccatatgtagaaagctgaaactggatcccttccttacaccttatacaaaaattaattcaagatggattaaagacttaaacgttagacctaaaaccataaaaaccctagaagaaaacctaggcattaccattcaggacataggcatgggcaaggacttcatgtctaaaacaccaaaagcaatggcaacaaaagacaaaattgacaaatgggatctaattaaactaaagagcttctgcacagcaaaagaaactactatcagagtgaacaggcaacctacaaaatgggagaaaattttcgcaacctactcatctgacaaagggctaatatccagaatctacaatgaactccaacaaatttacaagaaaaaagcatacaaccccatcaaaaagtgggtgaaggatatgaacagacacttctcaaaagaagacatttatgcagccaacaaacacatgaaaaaatgctcatcatcactggccatcagagaaatgtaaatcaaaaccacaatgagataccatctcacaccagttagaatggcgatcattaaaaagtcaggaaatgacaggtgctggagaggatgtagagaaataggaacaattttacactgttggtgggactgtaaactagttcaacccttgtggaagtcagtgtggtgattcttcagggatctagaactagaaataccatttgacccagccatcccattactgggtatatacccaaaggactataaatcatgctgctataaagacacatgcacacgtatgtttattgcagcactattcacaaaagcaaagacttggaaccaacccaaatgtccaacaatgatagactggattaagaaaatgtggcacatatacaccatggaatactatgcagccataaaaaatgatgagttcatgtcctttgtagggacatggatgaaattggaaatcatcattctcagtaaactatcgcaagaacaaaaaaccaaacaccgcatattctcactcataggtgggaattgaacaatgcgaacacacggacacaggaaggggaacatcacactctggggactgttgcgaggtggggggacgggggagggatagcattaggagatatatctaatgctaaatgacgagttaatgggtgcagcacagcagcatggcacatgtatacatatgtaactaacctgcacattgtgcacatgtaccctaaaacttaaagtataataataataaaattaaattaaaaaaaaatcctgttgtcttcagtggagaacagtttgtttttttcaattcgtatgccaattttaaaaatttcatttcatttgcagggtactattgaatagaaacaatgatggcagacatctttatattttattaaatctgagagggaatgcctctttttcttgttttcatcattaaatatgatatttgttgcttttgatagaaaactcttacccagttatgaaaaatgtctctttttctagttggtgaaatatatgtgtgtgttttaaccatgaatagatttgaaatgatatcaaattattttctctatctactgaatatgacaagaatttttcttttttaatgtgttaaatatattgaattatattactagagattctcaatttgccacatgcttgtatacttgggataaactctacttggttttctgtattattttttcctaacatataattttgcttgataatttttaaaatttttcacctgtgtgttcataagattatactataattttcttgtcttatattatctttgtatgatagtttatgaacctcaacaaattaataggaggatttctcacttttttgttattttataacagtttgtataaaaagcaagagatacttacatgtgttaaaatctctcactgtgatcgtgaatttttcagctttctttgtagtcttataattgttttaatatttgctttacacattttgaggtaatgctaagtgcatataagtccaagactgttatattttcttggggagtttctcttttgtcattaagtaatgactattgtaattcttaataatactttttgccttaaaggctattttgttaatataagatactagctctctttggtttaaatatttttttatgtggtaggggtatctatcccttaccacttaaaaatctctttcaacggctctgtgttatggcttagtcatgatagcttatagcttaatttttttctttaattccatttaatataatagtcactgacttctcacttttactgcttttcactgccttttgggttttacggttattgtagaattgtttgtgttgacttcttgttatattccatctcagcagttctgactttccaaaataatggaaagaacatttttttataattttaagaaaaatatctgagagtgctacaatatcagatcagctcacatagattatgacttctgtaacccactgccatttccccatctacaatttaagccatgcatagtgtctactgtttagtaaaaagaaaaggaattgggaaattcctgtgatacaatttcttaacaagagtaatctcattggagttggaagaaggaaagaaataatgacaaaaagctgttctgcagtgccccagaagtccttaaacatggctggatttacaaaactgaagttgtcaccgttctgaggttcctcttttgtttccattcagattccacacattatttctcatatttgtatgctgtctatgtctatgcttcccatattactggatcattatagtattgggaataatttgttgtactagctatcttgattggtgtccctttctctcattggtgataactctaatgttaattaattttcttcccactggttgcaaatcatactattttgtgtcatcaaaattaaagaattttacttctatcttgttatatgaacaatattttaagaaacatctaagttttagatgtaaaactatggagatattatttatgagaaattagatattattttagaaattattttgtgcatttatatacttatggttggagacattaaattagtttggcctttctatcgaggctaatggtatacttctggttctttgtcagttagcatgctctaaatcagaggttggcaaactttttctataaaggccaactaataagtatcttaggctttatagcttatgcagttcctctcacgattactcagttttgccactgtaatgtgaaagcagccatcgacaatttataaactaatggatggctatgttccgatacaattttatttattaaaacaggtgattaactgaatttgactgatggaccataacttgctgcctcgtgctctaagtgatagcacatctacttaagaatttgacagtatgttaaagtgagcatatgcacagttcttattagaaaattaaatttaattctattttctactgcagcccctgaaaagataattacttgtttcaaggcatatttttcatctggtcttttgcatattatagggagaatccttttgaacatggaagagacagagtgtgtctatgacagcttgcaagcatatgtatgatacaagaacacaaagtcatttttaattaacaatgactttgtgttcttgtatcatacatatgcttgcaggctgttataaaagtcattcatagtaaatctgctatgtaataaatacaaaaattacttataagtaatgacatcgtataccgattgaacttagaaactgttggaactttttttttaaataattagtagttcatggtttttccttgtatatattgcagttcagtgacaaaccatggaatcctggagctgcccagaacaatttgatttttgcatttgtgaagcttcttaaacctcctgtggtttagttgacacatctcagatacacaagaatttaaacattgatctaagctgtgaaaacacgtcatagttacattatcttacagcagctgctgtgcaccaattcagcctaataaattcttaagtgtatttcattcatgcaacttggcctattgctttgtttggagtatccagtaattcctatagacatataataaagagaaactcagtacagtgtatagcatagcaagaaatgctcatatggggcttttcccaaaagaacaactagtgattgaaagcactaaactccctaaattagcatctccttctctttcaagctacttacaggtcctatattgcaccaagatattgtcactaatttcactttagcataatattgagataccaccttgatcatctgtgttgtttctatacaatgggccaaatgctctctgccatgctaccaggaaaaacaattagcaaacgaattttttgtaatttgctgggattgtcatagtaaacattttttatcttttaaagtgtcttcctagaacaagaaggttacgcagtgactttgtaaatttttagctatggtgttacactggagtctttgtaatgcaaactaggaaagatcaggatgcctgcttttcatagcaagattattcattcattaaaagttaaaacacattgtttgttttggggcggtggtgctggatgttattatttcccacatgcccacttcagcagtagagaactgaaacgtcactgctgggtagcatttctgaagtcattgtgcttggattatttccttcatatttctactactgcaaactccttgctcctaatttgttagtatcaaatgtatcgcaaattcacaggtttcaatatgaggagataatttaaaaatgtagatttgtacttttaaaattgggttcttctttcattcagtaaacattttctcaacattatctatataccaacaatagtggtaggccctggggttgtgaagattaataaaacatagtcattttccttgagaaggtcttaaatagaatggaaaagacatacaaatgaatggttacaatactatacgatattcataacaaaagtaatgaacaaagtgctgtgagaagactgagggaaagatcaaagagtgactggaagacttccctgtttaatgtatgctgcaagacagtgagcaacaatgaaacaatgtattttgaatgctgaaaatgaacagtttgaaaatagaaataaaataaaaataccatttaaaataatatcaaaacccatgaatgattacaaataaaccttaaagaagagtataagaactatacccctttgtactatgtgagtaaatacaaagtaactttttggtaatttctttcaaatataattgcctctttaaagcacaactaatagcaatgttttatgaggtctataatgtgtgtataagtaaaatatgtaacacaatagctcaaaggattggagaggaaaatggaagtatactattgtaagtttcttaaactatatgtgaagcagaatattatttgaagctggattattataaattaaaaatgtagggtgttaactctagaacaatcactaaaaaaagaagaagaaaaagacgatttaaagcttcacaaagaatatataggagaatatctctgtgaacctggggataggcacaaagccaaaaacaagctaatcataaaaggaaaataaataaaaaaataaattcataaaattaaaaatactactaatttaaaaataacattaataagctgaatatgcgagctgaaggctgagagaaaatatttgtaatgcgtgtctctaacagaagacttttatctggaatagataaagcatttctataatttgtaatataaagataaagccttctctccatccacagtccactatccattgagcaaaagacttggaaaagcacttcaccaaggaagataaataaatggccaataacatataaaaatttctcaaaatttttagtcagcattatatttttaaacactccctaaaatgattaaaatttagaaaactgattacatcaaatgttggcagggatgtgaagcaactgaattttcttacattgctgcaggagattgaaaatggttctggcagcttttaaaaagttaaacatattccttcaacctaagtgtttatcagcagaagaatggataaataaactgtggtacatacatatacacaatggaatattgttaaagcataaaagagaatgagatcctgtcatttacaacaacatggacagaactggaggacgttatgtgaagggaaataagccaagcatgaaaagacaaatgttgcatgttctcactcatatgtgggaactaaagaaattgatctcatggagatagagtagaatgatgattaccaaaggctgggaagggtagtggagagaaaggagtaaagagggaatagttaatgggtactgaaatataatcagattgaagcaataagatttagtgttcagtaggatgattctagttgacaataatttattgtatattttaaaataactaaaagagtggaattagaatgttcctaacacaaagaaattataaatgcttgaggtgatggatatctcaattaccctgatttagtcattacacattgtatgcttgtattaaaatttcacatgtaccccataaatatgtatagctgtcatgtatccataaaaattagatattaaaaaattacacatattattcctcaatccaataatttcttctctacgcattttccctaagagaaatgaaaacatacttatacaaaaagacacgttcataaatgatcatagcagcattattataatatctaaaaaatagacacatctcaactatccaaatgcagaatcaattaacaagctatggtacatttttgtcagcaatggaaagggacaattactgataaatacagtaacgtggatgaatactaaagacattttgctgagcaaaaagagcccaataaaacagaatacatactgtgtaatttcatttacattagttctgggagaataactaatttataatgaaagaagttagaacactgtttggagggtgaggagtattttccaaaaaaggcacatggggttttcagactattctctgttcattgaaatgtgtgtttcagggatatatgcatttttcaaaattcatccacctgtacgcttaagaatggttcattttgctgtgtaaattagacttgaatcaaaactattttgttaaaaaattaaaacattaacaaagtagtggttactgtctggcaaaaattatacataaaatccctggacacgcaataaaataacatcacaggttaaaatttacagagtaaattgctccttttgttttgttttttacttactgattatagttagtatttttttcctatagagaatttattttcaaatataacaaaaaatctaaaatgggaaaagttctataatttattaattcagtagtttaatggttccttttatcttcctgctttacaaacctcagcatttctcctcaagagtatttcctattagtggctattatgagtgtttggtacatcataccaaacgtgcatacacatccatgcatacacaaggcccagcagaacactgaaggaccactaattccttgtgtcacttgaccttttttctgtaaaatatttcagacatatccaataatatatgtttcatatgcttaaataatgtttgatatgtttcatagggtttaaataatgtaacaaacatgtgtgaaccccactgcccagcttcaagaagtagacatagctaatgtctttgaagctccctgcacgccccttcccagtggcactcctcatctccccaggataattatctcatctcttggattttgctttttttattcctttgctttcaaaaaacagttttatcatactaaagcaatattcttaaataagatattgtttagttgtgcatattttcaaaatttcataaatggattaagtataacataacaaaaaaaagagatgttgtcatatttgatacttgtttcactattcaactatttcattgctatatggtattccactaaaggaaaataccacaatttatttattcattgttctttctatgaatatttgtttttttccagagttcatttttattatttattgcactattataaaaatattctaatgaattttcttgtacatgtatactggtataaaaacataagagtttctctaggaatatgtgtagatgtggaattattgtgttgtaggctatgcacaagtttactaaataatggcattttccctctaaatttagttgttccaattgccacacctattagtaatgtacaaatattcaaatcaacctccttccaaatactgaatatgtattatactcttcagcttttgacaatttgaaggatataaaatagtatcccaatatgattttaaggtacgcatatatttgtgagtgctcgtatatttcttttttcatgaaattcttcaattttttgggttttatttatatattggtcctttgtcttttcttcttgatttttaaggagctttttatagattctcaataaatttttcactgtttatatgtattttgatttttatttcaaacatgtggactactttttatactaattatcacatattttaatacacagattattaattttaatatagtttattttattaatatatttttcaaagcttagcatatatattatttatgacttatttcacagaaacagtcaaccatattttcttctatattatttaaagtttggcctttcctgaaatttctgatctgtctggaattattttttgtgtacaacgtgaggtaggaattgttgagaacgctggagagtctgagatgttaccttacttgcaagttcataaattagcctttgacagttttatgaatattggcagaagatacaagactcctgggtcagatacgagggtctttattactcagagcaatagcagcagttagaatgtcagaactcatgtcagttcctcgggccccagttcccataggatgatgtaatgttcaggtgacctcagcacacacagttgcattactgaagagaaacctcaagctaagggaacccaaatcttttgtaatgggcaggaatcatgcctgacctttgccccagagagcccgccccatagtcattagatctacccttttctccagaaggagacactacctctatctttcaaggctgtctgctatataatcatccttagcaagatggtctggaacaaactagtgtttctgtttgcaaaacatgcggaaatatgagagggccatagagaattgccttccaacaggaatctagtttctccccatccccatacaatgactaattggggtggatcagcatgatttaatgcatagtttcttctttcctcagatgtctgcagtgcttaccttgacataatcaggttcccatgtatgtctgtgtctgttctgggctctgtattctattaattcatagtctatcatgacatcaatgcaacatatttttacttatcacacctttataatagttcttgatctctggcagaatacttcccttgccggcgctaggcaaacagccacttgttcttcttcaggaatgtcttatatattcttatcctttcagtcttccttaaatttaaaaaacctgcagaagttccaatgcaaaacatttttccttgcaattcagaccttccctctcagattattttgcttcctcctacagtttattgaaaacttcctatagtaagctttatgcagtgtctccagtatgacttcccactgtagataggtctaaatcttgtttcctgtactctgcatgctacattttaagaactgaagttctgagtggctggcaagatggctggcaaattgtctgtgtttgcagatgacatgattctacatttagaaaaccccattgtctcagccccaaatctccttaagctgataagcaatttgagcaaagtctcaggatgcaaaattaatgtgcaaaaatcacaagcattcctatacaccaatagtagacagagagccaaatcatgagtgaactcccattcacaactgctacaaagagaacaaaatacctaggaagacaacttacaagggatatgaaggaccttgaagagcaaggagaactatgagccactgctcaaggaaataagagaggacacaaacaaatggaaaaacattccatgctcatggataggaagaatcaatattgtgaaaatggccatactgcccaaagtaatttatagatcaatgctatcctcatcaagctaccattgactttcttcacagaattagaaaaaactactttaaatttcatatggaaccaaaaaagagcccatatagccaagacaatcctaagcaaaaagaacaatgctggaggcatcatgctacatgatttcaaactatactacaaggctacagtaaccaaaacagcatggtgctggtaccaaaacaaatatatagaccaatggaacagatcagaggcctcagaaataatgccacacatctacaaccatctgattttcgacaaacctgccaaaaacaagccatgaggaaaggattccctatttaataaatggtgttaggaaaactggctagccatatgcagaaaactgaaactggaccccttccttacaccttctacaaaaattagctcgagatggattaccgacttaaacatgagacctgaaaccataaaaactctagaagaaaacctaggcaataccattcaggacataggcatgggcaaagacttcatgactaaaacaccaaaaagcaatagcaacaaaagccaaaactgacaaatgggatctaattaaagagcttctgcacagcaaaagtaactaccatcagagtgaacaggcaacctacagaatgggagaaagtttttgcaatgtatccatctgacaaagggctaatatccagaatctataaagaacttaaacaaatttacaagaaaaaagcttacaaccccatcaaaaagtgggtgaaggatatgaacagacacttctcaaaagaagtcatttatgcagccaacaaacatgaaaaaaagctcatcactagtcattagagaaatgcaaatcaaaactgcaataagataacatctcatgccagttagaatgaccatcattaaaaagtcaggaaacaaagatgctggagaggatgtggagaaataggaatgcttttacaatgttggtgggagtgtaaattagtgcaaccattgtggaagacagtgtggcaattcctcaaggatctagaaccagaaataccatttgacccagcaatcccattactgggtatatatccaaaggattataaatcattcttctataaagacatatgcacacttatgtttattgcagcactgttcacaatagcaaagacttgcaaccaacccaaatgctcatcagtgatagactagatgaagaaaatatgacacatatacaccatgcaatactatgcatccgtaaagaggatgagttcatgtcctttgcaggggcatggatgaagctggaaaccatcattctcagcaaactaacacaggaaccgaaaaccaaacactgcatgttctcactcataagtgggagctgaacaatgagaacacatggacacagggaggggaacatcacacacaggggcctgtcagggtgggggcctaggggagggatagcattcagagaaatacctaatgtagatgatgggttgatgggtgcagcaaaccaccatggcacatgtatacctatgtaacaaacctgcatgttctgcacatgtatcccagtacttaaagtataataaaaaaatacaaataaaaaaagaagtaaagttctagtcatcagacatcagcagacggcctgtgacaaacagcggcctcagctcatttacttctctgcatgtattctttcacattgttttcaacttctcagaacttttcatgcctttatttttgaccactcagctatgcattctgaaagatgttttgtgtattttatgttaacatttttagggattttgcactgatagtgattttcaggacatctatcaatccttgccagaaatggaagtcgcatattgatggtgtttttaaatggtttaatctgacagtattgtgcgttttgcacacaatcagcattcaacaaagtgtgtttaattgaactcaaaacaatttatttgggtttctctgatgttgctgtgtcattctcaaataacttagtacctaatttggcattactaccattagataacttttcctcttaaaactgtgcaaacttatagaatattttgaacatacagaaaatgatataattgaatttttgtacttcccaccaagattaaacttatgttaatatggtgcctaatactttttactccacaattatatttacttaaaagcaatatataatcatttttgtatattttgtaattttaaaatttcacacaaatatagtatattccttatatctgttacaaactgcttttcttctcggtcaatatcatgtttgaaaaatttatctattactgatacagtaagctctaatataattactccaagtcctatatagaattctattataaattatattttatttaatagtgcttttattctacaataaatatatatatcctgttgagcatatgtttgagagtttttttttgtaaattaaatgttaagaactgaaaatgctttataacaggatgtatttccctttaaattattaggtatgtccactttcttatatctaatctttatgagtgtgatggaattgatcattataaaagataggacattttaaccttatttcattattaaatacaatttgtgaaaggtatagtacaggtcaagataaggattatgttggagatatgttgtgcatggtactttgcatataactcaaattatgccaaaatctatattgttatataatgaaaaactagtgatttgaaaatttatgctccatttctttttcctctaggtatttatgagcctccatttcttatactactgcagtgaaccaacattggatgtgaaaattgccttttgtcaggtgtgtgttccttacaggtaaaacaaggtacagtatattcccttgtatttccactttgacataccatttgcatacattccacaccaaagtcagtatttatatcatattaacagtagtttagaattaggagctggcaagacggctgaatagaaacagccccagtctccagctcccagcaagatcaacgcagaagacgagtgatttctgcatttccacgtgaggtacctggttcatctcactgggaaaggttagagagtgggtgcagcccacagagggtgagctgaagcagggtggggtgtcgcctcacccaggaagtgcaaggggtcagggaactccctctcctagccaagggaagccatgaggaactgtgccatgaggaatggtgcactctggcgcagatgctacactttttcgatggtcttcgcaacctgcaggttccctcaggtgtctacaccgcaagggtcctgggtttcaagcacaaaatgggcggccgtttgggcagacaccaagctagctacaagagattcttttcataccccagtggtgcctggaacaccagcgagacagaaccattcaccccccctggaaagggggctgaagccagggagccaagtggtctagcttaggggatcccacccccatggagcccagcaagctaagatccactggcttgaaaattctcactgacagcacagcagtatgaagtcgacctgggatgctcaagcttggttggggggaggggcgtctgccattactgaggcttgagtagacggttttcccctcacagtgtaaacaaagatgctggaaagttcgaactgggcagaggccaccacagctcagcaaagccagtgtagccagactgcctctctagattctgcctgtctgggcagggcatctctgaaagaaaggcagcagccttagtcagcgacttatagatgaaactcctatctccctgggacagagtacctgggtgaaggggcagctgtgggcacagcttcagcagacttaaatgttcctgcctgccagctctgaagggagcagcagatctcccagcacagcaatcaagctctgctaagggacagactatctcctcaagtgggtccctgaccccacacctcccagcaagggtcgacagacacctcatacaggagagctccagctggcatctggcaggtgcccctctgaaaaaagcttccagaggaaggaacagatgcaatctttgctattctgcagtctctgctggtgttactcaggcaaacaggatctggagtggacccccagcaaactccagcagagctgcagcagaggggcctgttagaaggaaaactaacaaacagaaaggaatagcatcaacatcaacaaaaaggacattcacacaaaaaccccatctgaaggtcatcagcatcaaaaaccaaaggtagataaatccacaaagatgaggaaaaaccagcacaaaaaggctgaaaattccaaaagccagaatgcctcttctcctccaaaggatcacaactcctcgccagcaagggaacaaagctggatggagaatgagtttgacgaattgacagaagtaggcttcagaaggtgggtaaaaacaaactcccccaagctaaaggagcatgttctaactcaatgcaaggaagttaagaaccttgaaaaaaggttaaaggaattcctaactagaataaccagtttagagaagaacataaatgacctgatggagctgaaacacacagcgtgagaacttcgtgaagcatacacaagtatcaatagccaaatccatcaagcggaagaaaggatatcagagattgaagatcaacttaatgaaataaagtgtgaagacaagattagagaaaaaagaatgaaaaagaatgaacaaagcctccaagaaatataggactatgtgaaaagaccaaacctatgtttgattgatgtacctgaaagtaacagggagaatggaaccaagttgaaaaacactctttaggatattatccaggagaacttccccaacctagcaagagaggccaacattcatatccaggaaatacagaaaacaccacaaagatactccttgagaagaccaaccccaagatatataatcatcaggttcaccaaggttaaaatgaaggaaaaaatggtaagggcagccagagagaaaggttgggttacccataaagggaagccgatcagactaacagcaaatatctctgcagaaaccctacaagccagaagagagtggggggcaatattcgacattcttaaagaaaagaattttcaacccagaatttcatatccagccaaattaagcttcataagtgaaggagaaataaaattctttacagacaagcaaatgctgagagattctgtcaccaccaggcctgccttacaagagctcctgaagggagcactaaatacggaaaggaacagttggtaccagccactgaaaaaacatcccaaattgtaaagaccatcgacactatgaagaaactgcatcaactaatgggcaaaataaccagctgacatcataatgacaggatcaaattcacacataacaatattaaccttaaaggtaaatgggctaaatgccccaatcaaaagacacagactggcaaattggattgagttaaaattggatagagtcaagacccgtcggtgtgctgtattcaggatacccatctcacatgcaaagacacatataggctcaaaataatgggatggaggaatagttactaaacaaatggaaagcaaaaaaaaaaaaaaaaaaaaaaaaaaaaaaaaaaaaaaagcacgggttgtaatcctagtctctgataaagatcaaaaaagacaaagaaaggcattacataaaggtaaaggggtcaatgcaacaagaagagctaactctcttaaatttatatgcacccaatacaggagcacctggattcataaggcaagttcttagagacctacaaggagacttagactctcacacaataatagtgggagaatttaacaccccattgtcaatattagacagatcaacgaggcagaaaattaacaaggatattcaggacttgaatgcagctctggaccaagtggacctaatagacatctacagaactttctaccccaaatcagcagaatatacattcttctcaacaccacatagcatttattctaaaattgaccacataattggaagtaaaacactcctcagcaaatgcaaaagaatggaaatcataacaaacagtctttcagaccacagtgcaatgaaattagaatgcaggatttaaaaacttactcaaaaccacagaactacatagatactgaacaacctgctcctaaatgactactgggtaaataacaaaattaaggcagaaataaatcagttatttgaaattgaggagaacaaagacacaatataccagaatctctgggagacagctaaagcagtggttagagggaaatttatagcactaaatgcccacaggagaaagtgaaaaagatctaaaatcaacatcctaacataataattaaaagaactagagaagcaagagtaaacaatttcaaaagatagcagaggacaagaaataactaagatcagagcagaactgaaggatagatacacaaaaaacccttcaaaaaatcacagaatccaggagctggtttttttgaaaaggttaacaaaatagatagactgctagccagactaataaagaggaaaagaaagaagaatcaaatagacacaataaaaaatgaagaaggggatatcaccactgatcccacagaaatacagactaccgtcagagaatactataaacacctctatgcaaataaacttgaaaatctagaaaaaatggttaaattcctggacacatacaccctcccaagactaaaccaggaagaagttaaatccctgaatagaccaataacaagtgctgaaattgaggcagtaattaatagcctaccaaccaaaaaaagcccaggaccagacagattcacagctgaattctactggaggtacagaagagctggtatcattccttctgaaactattccagacaatagaaaaagagggactccttccttactcattttatgaggccagcatcatactgataccaaaacctggcagagacacagcgtaaaaagaaaatttcagggcagtatccctgatgaacatcaatgtaaaaatcctcaataaaatactgacaaaccaaatccagcagcacatcaaaaagcttatctaccttgaccaagttggcttcatccctgggatgcaagggtgtttcagcatatgcaaatcaataaatgtaatccatcacagaaacagaaccaatgacaaaaaccacatgtttatctcaatagatgcagaaaaggccttcgataaaattcaacacccattcatgctaaaaactctcaataaactaggcactgatggaacgtatctcaaaataataagagctatttatgacagttccacagccagtatcatactgaatgggaaaagctggaataattcccttagaaaaccagcagaagacaaggtgccctctctcaccactcctattcaacagagtattggaagttctgactggggcaatcaggcaagagaatgaaataaagcgtattcaaataagaagagaagaagtcaaattttctctgtttgcagatgacatgattgtatatttagaaaacctcatcatctcagtccaaaatctccttaatctgataagcaacttcagcaaagtctcaagatacaaagtcaatttgcaaatatcacaagcatttctatataccaataatagacaaacagagagccaaatcatgagtgaactcccattcacaactgctacaaagagaataaaatacctaggaatacaattaaaagggatgcgaatgacctcttcaaggagaactacaaaacatggctgaaggaaataagagaggacacaaataaatggaaaaacaaaacataccatgctcatggataggaagaatcaatattgtgaaaatggccatactgcctaaagtaatttatagattcaatgctattcccatcaaactacctttgacattcttcacagaattagaaaaaactactttaaatttcatatggaaccaaaaaagagcccataaagccaagacaatcctaagcaaaaagaacaacactggaggcatcatgctacctgacttcaaactatattacaaggctacagtaaccaaaacagcatggtgctggtaccaaaacaaatacatagaccaatggaacagaacagaggcctcagaaataatgccccaaatctacaaccatctgatcttcaacaaaaataagccatggggaaaggattccctatttaataaatggtgttgggaaaactggctagccatatgcagaaaactgaaactggaccctttccttacaccttatacaaagattaactcaagatggattaaagacttaaacgtaagacctaaaaccataaaaaccgtaaaaaccgtggaagaaaacctaggtaatatcattcaggacataggcatgggcaaagacttcatgactaaaacaccaaaagcaatggcaacaaaagccaaaattgacaaatgggatctagttaaactaaagagcttctgcacagcaaaagaaattattaccagagtgaacaggcaacccacagaatgggggaacatttttgcaatgtatccatctgacaaagggctaaagtccagaatctataaagaacttaaatttatgagaaaataacaaacaaccccatcaaaaaatgggcaaatgatatgaacagtcacttctcaaaagaagacatttatgcagacaacaaacatatgaaaaaaagctcttcatcactggtcattggagaaatgcaaatcaaaaccacaatgagataacatctcatgccagttagaatggtgagcattaaaaagtcaggaaacaacagatgctggagaggatgtggaggaataggaaagcttttacactgttggtgggagtgtaaattagttcaaccattgtggaagacagtgtggtgattcctcaaggatctagaaccagaaacaccatttgacccagcaatcccattactgggtatatatccaaaggattctaatcattcaactataaagacaaatgcacaggtatgtttatagtggcactgttcacaatagcaagacttgcaaccaaaccaaatgcccatcagtaatagactagataaagaaaatatgccacatacacaccatggaatactacgcagccataaaaaggatgagttcatgtcctttgcagggacatggatgaagctggaaaccatcattcttagcaaactaacaggaacagaaagccaaacatcccatgttctcactcacatgtgggagctgaacaatgagaacacatgggcacagggaggggaacatcacacaccagggcatgtcgagagggatagaattaggagaaacacctaatgtagatgacagattgatgggtgcagcaaaccaccatggcacatgtatacctatgtaacaaaccttcatgttctgcacatgtatcgcagaacttaaagtataagtttttaaaaaagtagtttaggaaatggaagtgaataggtgtttagtttctaattcatttaagttagaatgggaataaaggtaattttttcaagttttattataaagtgatttcttctttgattatatttacacttaaagattttagtatttcttttcaaatccttgaaatgggtctttaaccataaaaatagtttcattctttacagtagtccccccttatctgtggtttcggtttccacagtttcagtcacctactgttaactgtggtcctcaaaatattaaattgaaaattccagaaataacaactcatgagttttagattgcacgctgttctgagtagtgtgaagaaatcttgtgccatcttgctccatcccacttaggttgtgcagcacgtccatataatgccacctgccagtgaattacgtaacaaccatctctgttatcagattgactgttgtggtatcacagtgctcgtgttcaagtaacttttattttacttaattgttctattttatattagttattgttgttaatatcttactgtgcctaacttataaattaaactttatcataggtatatatgtatagggttcagtgctatctgtggtttcaggcatccactgggggtcttaaaatgtattctctgaatataaggggagactactgtattattatttctcatcatacgaactgattagcctgaaatagagtatctctaaacccactataataatatacaggtggtagtcagttttttttctgatgcctaattctaaccagtacttataatagtaaaaatgttaaccaacaataatgacaaacaatggtatacttaacctagaagggaaagtaagaaggtggcaacaacgtttgttagtgtgcatggactagataagagttgacttctttgtattcatgcaaaccctatctttaaggagaaggctccctagggcacctacataaacttcaagtatttttaaaacagttctaacttaaccctgttgtcatatataattgacagtgctttcttttactctcaagaattgttctagttttggcaaaaaattgtatgttaccttattcatacttaagcagagagcttcccttcagtttttcagcatgattatcattgcaccttctctttgagctgtgttttaaataaagaatgacatgaatcattgaaacaagatttttaaaataactcttttgctttattttaatgcaatctttcctgattctagaattaatatttgcttattatagaaaatatagaaaagcataaaaggaaacaaaacattgtttttgcatatgctttctgtaactactgtatgtactttccttgagcatagattttctatgagaaagtaaaatgtgttgcctgcaatgaataagatttactgatctctctcatctccctaaactgtaattgttgcagtttctgaagtctcaggccattagacaacttctctaataagaactccagtgctagacagccttggttagaaattccatttctatcccttattagccatttacttgtgaccttgggcaagttacttgatctctatgtgcttcagtttctttatttataaaaggaggaaataataatacctatattttaggcttgttatgagaattaaatgagtttatacttgcaaagcactgagagcagtactggcacatgtgtttgttaaatagatgattaaattttaaataaatttatactcactttctagtgctcccactgagtcccagtgctttaaatattatcattatcatgaatatcacacagttttatctccaacccaaacattttcctggaactggactcatattcaactgtctgttctacatctccacttagatgtcaaataggcatatcagactgtacgcattccaaagcaacacctcatctatcctctaaaattactcttcccattgtctactccagttcagtaactgataacttcactcttccacttataataaaatccttggaatcatcttttgggtcacactccatattcaagctgtcagcaaattctgttgactctataattaaaacataactggaatctcactgattctcactatttctccactaccaccctgaaagatacccttatctcttgcttaaattattgtaagagcttctacttttgcccacccccaagtggtttactcttaaaacattagaaagaattgtctttgaaaaataattgagatcatgtcactccttgactaaaactaaaacaaaagagaaagacctttcaatgtcttcctatctcactcagcaaaaattaaaatccttataataaatccccaagcctttattatctagccccctagaaacctctatcctaaaatgttcttctgttatccacttgggccactccttaaccatcttcagggcttcactgaaatgtcatttttaagcaaatctttcctgacaatccttttaaaaatagtcctaactacctgactgcatacccaacttccttgcctccataatacatcagtatctaacgttctatatatgttgctggtctggaattttgctcctctctctccacttgaatgcattttgcacatgaaccagatttttttcagtgtcctgctggggccagttcacacaggctcacaagagctgaatatgcacaactttccaactcaaagtttaacgatgccaagttggtaacttaaaatctgtcatgatcggagtatttatgttacagaaatgtgcaaatactgcaaataggcccctttcccattatttctcctccccagccagttgttgaacatttaccagcacaccattggaatcgtctcctgttcactgctgtactgcagaactcacaatagtatctgacatagggtcggtgtattaggcagttcttgtgatgctataaagaaatacttgaggctgggtaatttatagagaaaagaggtttaactggctcatggttctgcgacagtacaagaaatgtggcacaggcatctgcttctggttcaggaagcttacaattatggtagaaagcaagggaggagcaggcatctcacacggccagcgtgggagcaagagagaaagcagggaaggtgccacacacttctaagcaaccagatctcataagaactcactcactgtagtgaggacaacaccaagccacaagggatccatctccatgacccaaacacctcccaccaggccccacctgcagcactgaggattacattttaacatgagatttgaaggggacaaatatccaaaccatatcagtaggctctcatcaaacatctgcagaatgaataaatgaatcatacatgttttgcttatgtaatcagtagcaacagtgatcctgctgtggtgtaaaatgagtaggcctgaatttttaggttaaatatctgggccctagcacttgcaagctgtatgactgtgagctatttccttagccttcattatcctagccatttacttgccattaacacttaaaaaacataccaaccgacataaaaccataaaaaccctagaagaaaacctaggcaataccattcaagacataggcatgggcaaggacttcatgtctaaaacaccaaaagcaatggcaacaaaagacaaaattgacaaatgagatctaattaaactaaagagcttctgcacagcaaaagaaactaccatcagagtgaacaggcaacctacagaatgggagaaaatttttgcaatctactcatctgacaaagggctaatatccagaatctacaatgaactcaaacaaatttacaagaaaaatacaaacaaccccatcaaaaagtgggcaaaggacatgaacagacacttctcaaaagaagacatttatgcagccaaaagacacatgaaaaaatgctcatcatctctggccatcagagaaatgcaaatcaaaaccacaatgagatactgtctcacaccagttagaatggcgatcattaaaaagtcaggaaacaacaggtgctggagaggatgtggagaaataggaacacttttacactgttgatgggattgtaaactagttcagccattgtggaagtcagtgtggcgattcctcagggatctagaactagaaataccatttgacccagtcatcccattactgggtatatacccaaaggattacaaatcatgccactataaagacacatgcacacgtatgtttattgcggcactattcacaatagcaaagacttggaaccaacccaaatgtccaacaatgatagactggattaagaaaatgtggcacatatacaccatggaatactatgcagccataaaaaatgatgagttcatgtcctttgtagggacatggatgaagctggaagccatcattctcagcaaactatcgcaaggacaaaaaaccaaacactgcatgttctcactcatagatgggaactgaacaatgagaacacatgtacacaggaaggggaacatcacacactggggactgttgtggggtagggggaggggggagggatagcatttggaaatatacctaatgttaaatgacgagttactgagtgcagcacaccaacatggcacatgtatacatatgtaactaacctgcacaatgtgcacatgtaccctaaaacttaaagtataataataataaaaaaaaaccagccaaaactaaaatctaagttaatgttttacatatttcaagactaaatctgaaactcaaaaacaattatcaattaacatagcctaaaaatttcagccattttttaaaatacagaaagtctttgtgtagggtgtcgttatttttcagttcaactttctacatttgggtgtagatacagaatgtttatttttaatgagagttcttttaaagcaaaggaataaaaagaagtgaagcatgaactttcttaatgactggattttcttgcttattatgagcttttaatacacagaaaatatgcatgcatataacgtttttaaaaaatctagaaatagcatagtaaaaatatttccatttgtgactggacattttatttacttcctatgtagaattttctctgataaaaacacttatttttatttttcttataactctgtgcctcattcacttctctagcaatttaaagaaaacagtgtatttatttttagaggcagaatgatgtattggggttttctttctaactatgttccttggaagcttctcatttcctggggcatctcacagatcctttatgtgctatggtgtttaagcttatcaccagcttggctaaggctactctcaactttttgcccaacagacaatactcaaagatcttaaaaaacttgtcaataattaattaatgattaactgtgtccagaattccagtctcttgagccttagtccatggggttttcaattatgtcatatttctaagcttttcactattgtctgcaagaaatcagagaaatacggaaaatgaaattgctgaatagtatttgttaacagaaaataggtacattatctttaatagtttttaccttaattcttaactcaattatttgaagaatatgggattcactgacttttttgaagaagttactcttattattttttttaacccaaccaagtagcttttgaaggcaagaggcttcttgttatagtctcgggagaaatttttctttgtaatgttggacaataaaagaataatctttagtttgcactggtattaattcaataattacaaaaatataaacctacagggaatataaagtgaaaaattcttgattctcctgagcaataggtaagtagtcttagccctcttttctcaattgaacagaggtacagaactgttacatttcactctatgaatttaaaaaactcatgaaagtgttctttttggaactttgttgtactgaacagattattcaggattttaaccaggagatatattcacagagaaataatatgtgttgtggctccccaactcctacacactctctggtgtctacagcacttaccgcattctttgtgcattactactaagtttacagatttgttttccccattcagtggtactatctcagggtcaggaccagggcatcttcctccttaactcccaggcccagaagtttatcttactacagaaaatattcaatgaaagagggaaaatgaaaacccagcagaaaaacaccatttcctaagtagaaatgtgtttgcttgcttttcaaaatcaaatcaatttttcaacatcctcatatcctacaagtgtatgttaatagatttaattatgttttcattattttcctaatcataaatcagtatttacctaacatttatctaacatttatcaacttagtgtcctctgtaaacatttaccgatgatttagttatgaataattttaaattatttcctgattttgagaaagcctgtgacacagagggtacaaattaattaatcatcaaatcataaatttaagcagcactagaagtaaaagggactgagctaagactggtcttcctttttcttatgacacaaaaactccttttggctccttatctactcgttgactgattgattattgattttaccattcatcgattcaatacatatttttaagagtttttggtaatttttctaatttattagtttaatatccatcccatttaaaaatttaatttacttaaaaaaattggcacataacaatcatacatgtttatggaggtacatagtgatgttttgatacatataatgtatagtaatcacatcagggtgattaacatatccatcatctcaaacatttatcacttctttgttttgagaacattcaatatcctccttctaactatttgaaatttataatataaactatagtcaccctacagtgctgtagaacaccgtattttattcttcctgtctagctctaattttataccctttaacaatctcttttttcccccaacccttacccatctcagcctccagtatcctctgttctactttttatttctatgagatcaactttttttagcttccatatatgaatgagaacatgtggtgtttaacttcctgttcttctcttatttcacttaacataatgtcttccagttccattcatggtgctgagaatgacaggatttcatttctcttttatggctcagtagtattccattgagtgtatatacctaatttgctttatctagtcatgtgttgttggacacctaaggttgattccatgtcttggctattgtgaatagtgcagtaaacatgggggtgcagatatctctttgatacactagttttcttttttcttcttcttttttttttttttgatgaacacccagtagtgggattgctggatcatatggtagttctatctgtagttttttgaagaagctatatactgttctccatagtgcttgtactagtttacattcccaccaacagtgtataagagcttccttttctccatatctcaccaacatttattattttttgtcctttttataatagtcattctaaccggggtagaataacacatcaatgtggttttgatttgtagttttctgatgattagtgatgttgagtgatcttttcatatattttttggccattcgtgtgtcttcttttgagacatgtctgttcagatcatttgtttattttataatccagattttgttgttgttattgagatatttgagctccttgtatatttaggatattaattccctttggaatcaatagtttgaaaatattttctcccattctttgggttgtattttcactttgctgattgtttcctttgctgtgcaaaagctttttagtttgatacaatccatttttttttgttttgttgcctctgcttttgaggtcttattttcataaaatctttgcccagaacagtgttccaaagcatattccctatgtcttcttctagtagttttatagttttaggtcttacatttaagtatttcatctatcttgagttgtattttgtttattgtgagagatatagtttcattcttcttcatatggataaccatttagcatcatttattgaagagagtttcccttccccaatgtatgttcttggtagctttgtcaaaaggtagttggcgtagatatgtaaattaatttctgggttttctgatttgttctgttggcctatgtgtctgtttttatgccagtgccatgctgttttggttactatagccttgtagtatattttgaagtctggtggcgtaatatctttagctttgttctttttgttaaggattgctttggctatttggggccttttgtggttccatacaaatttttggattttttttcctgggaagaatgtcgttggtattttggtaggcgttacattgaatgtgtaggttgctttggttagtatggtcatttaacaatattaattcttctgatccataagcatgagatatcttttcatttgtatcctttttaatttctttcatcggtgttttatagttttccttgtataagtctttcacctccttggttaaatttattcctaggtattttattgtttgtgtactattgtaaatggaattgacttcttgatttcttttcttttctttctttttttatttttatttttgagatggagtcactttgtcacccaggctggagtgcagtggtacgatcttggctcactgcaacctccacttcccaggttcaagtgattctcctgcctcagtatcccaagtagctgggactacaggtgctgaccaccatgcctggctaattctttgtatttttagtagagacaaggtttcatcatgttagccaggatggtctcaatctcctgaccttgtgatgtgcccaccttggcctcccaaagtgctgggattataagcatgagccaccacacccagcaaacttcttgatttcttttttagctagtttgttgttcgtgtgtagaaatgttactgatttttgtttgttgattttgcattctgcaattttattgaatttgttttgttacttctaagggttttttagtagagtctttaggtttttctatatatgagttcatgccatctgcaaacagggacaacttgacttcttcctttctactttggatgccctttacttatttctaatgtctaattgctttgaccagttcttccagtactatgttgaataatagtggaaagagtgggctgtcttgttccacttcttagaggaaaagctttaaggttttccctattcagtatgatgttagctatgggtttatcataaatggcctttgttgcaagacatcttactgagtacctataaaatgtacttgtaatttgtgtaatataaactagagatacagcatgatgtggttactctcctaaaaaacatgctgtttactctcaatcatggtagggagtagttaggcttataaacattaaaaaaaccctactccttagagttcaagacctcagagataagcaataatgagtcaccaaacatccaaccaaccaaaacccctcactacctattgaatacttactgtgtgtgaaaaatttattaatattttacctcattttatctttataataccacttaaactacatttaactgagaacaaaaaaactatgattaaatgcaaaggaacctaagatacttttggaccagtagggggaaaaaggtttttacacaaattccaaaatattgtggtggtatttaaggtccaaaaatactactggagataagaaaaaaatagcagtcttaatgtggagttgttagtgtcaaaattagccttcagttaaaaacaattcttactttttttggcattttacgttgtaagatataatagccaagattaaacatgttgcctttttttggttaaagcaatgtcttttaaataaatatgaaatattattagatgacttgattagttaattaaaatatattttattcctctggataataaaagcactatatgtgtatatataataatatctatcctttagcaaaattactgatcacttgatttactattactttttggcacagtgtttttcaatctttggaaatttcaggataatttgctaatgttttatggggtgcagtaacctttaagagccctttttaaacctggaaactagtaaacaagggaatttgtaaaaagaagtgtctggagtgtccatggagcgatttcattttaaatgatatgttgagattactagcatctagagcatttaaaaaacatcattaagcttggttccagaattatatgggtttttaaaaacagctctcttgattttaaggcaatttgaatttaaaataacttgctcatttcatttgatgggtctatgatgtttctatttcaaagactttgaaaatatccaattaaaaattttatacttcattggatggccatcctagttggaataaagacttctataccaacatgagaagtaaagcaacaaagaaaaagatttttggcagagcagggcaaaggaaaaacctgcataatgtaacaggtaaactgtaaaccattttaggtgatctgtgaaacaaatgatatggtttgtatggtttaggtttttgggaggactgcctgaaccccccaaaaactcaatttagagtcttcacctgatacacatatggcttaaggggatcagcaggttgaactgtggatgtagttgaaggcactggtgtttcataaataaatggctgtggttttgagatatgaacctatatatccctttttaaaaaaactattttagtttttcatgtaatggggaaagagaaatttttactttaccttctccttttaatgagtgttctttcttatgtattatttaaggaaacctgactctttcttctacatctgctttaatatgtaacatttaattttgcactaattttctaaaatcacaatgtatatgcttttgtttgcatgactatgagtaaattattaaacaaagataaggtaaacattattataaaaatgtgatatatcttgtatgttgaaataaatcacagagatttctgtactgtcatgataacggtctacctgtttttatggatgaatgattaatgttgcttgacattaggttttttctgggtatccacaggtgaacacagttatagcaaatttcagaagtgttaatttagtgctatgcttctgttttatatgctgagcagtttttttctaaaaatttattaagtagttattatagttaatgaatacccttagttatgctgctcaagtttaacagaaaatttgaaggtcctaaggttcagttccgtgataattaacttttctgtattggttcattgtgaaaatgtgcttgatttgcttgaagcacaaaaaggtcagattttgacttctttttgaattggtttaacctgaattcaagtgtaatttgatgttatgagcttaattattgttgaggtattaatcagattaaatgcagttattagttacatttttcaaaatacagaagttgtgttaaaaaatattccagaactattcgtgattttcagtgtatggttaatttgtaatcatgctctgcaagagaagcatcaacttttggattccattcttttctatattatgttcttaggtaatcaactaactccttaagtacactattttaattctattatccttctgataggagacttttgaaatatattttaagtgataatgtttgcttatctgcacagttattatttgaaagtatgatgcatgataaccataggctgcatttttcagtaggttaagaagaatgtccactttggttctgagttctaaaaccagttctaatctggagtgtatcattcaattcctcttttgttcatcttctctgtaagtgaatgtttatttggttatagatatgtctaactcattcaataaaggtcaagtcagctacaaaagtacatattcaaaaagatgaaaaacaagatcatggagaatgtggaactattaaagtgaggtaccaattaaatcctttcataattgtgcagatgagggaatgataaggatatgcttcatgtattagtctgttcttgcattgctttaaatatgtacctgaggctaggtaatttataaataatagagatttaattggttcacggtcctgcaggctgtacaggaagcatggaagcatctgcttggcttctggagtggcctcaggaaacttgtaatcatggtggaaggtgcaggggaaataggcacgtcttacatggcaggagcaggaggaagagagagaggagggaggtgtcacacacttttaaacaaccagatctcacgagaactcactattgagatggcagcactaaagggaatggtgttaaaccatgagaaaccacccccatgatccagtcatctcccaccaggccccacctccaacactggggattacaattccacaggagattggggtagacatacagatcaaaaccatatcacatcacacagggtttaagaataacgttctttgttgtgtgaatgaaaacatggctttagtgtttcagattcttaaatgtagcatttgaaaaactctaattctcttttctaaaaatataaagacatattttagagatgagttagtgaaatccagataattcattttaaccatttcgattcccaaatgaaatttttactttccttattatgaaatattaacctcttacttccactctgagaaggatttttttaaaataaaatttattattactactctggaaaatttgtcctgtctttgattatgtaataccacttattatttctgatttcgtatgtcttttttctttattgcagacaaattgtgaatgtgtagatcaaaaggtgtaaaattcagtgtgattagtttagtagtctagatcattgtgataatgaggcccataacttgaaaaagtttgatcctctaagggaaaatttaatattaagctccatgaggtcaggagctttgcattctcagtgtctagggtagttcttggcacattttatgaccaaaataaatatagaatgaagaacatactgcagtaataatagactccaaatctcagtgatatatcagatcaaaagtttatttcctgtcattcaaattccaattcaggtgagcaagggttgtcctctatctggtgactcaggagtttagtcatcctgtgatgcacgagctaaaacaccactgtggaaagagaagtgttgaggaggcacatcacctttttaaaaaaatttaatttaattttaagctctgggatacatttgcagaaagtgcagctttgttacataggtaaatatgtgccatgatgatttcctgcacctatcaacccacccacatgcattagctatttgtcctgatgcactcccttccaccacccccctgacaggtcccagtgtgtgttgttcccctccctgcgtccatgtgctctcatttttcagctcccacttatgagtgagaacatgcagtgtttggttctattcctatgttagtttgctgaggatgatggcttccagcttcatgcatgtccctgcaaaggatatgatctcattcctctttacgactgcgtagtattccacggtgtatatgtgccacattttctttatccagtctattattaatgggcatttgggtttgtcatgtctttgctattgtaaataatactgcaataaacatatgtgtgcatgtacctttatagtagaattatttatattactttgggtatatacccagtaatgggattgctgggtcaaatggtatttccggttctagatccttgaggaattaccacactgtcttccacagtggttgaagtaatttatattcccaccaacagtgtaaaagcattcttatttctctgcagccttgccagcatctattgtttcttgaatttttaattattgccattctgactggtgtgagatgttatctcattgtggttttgatttgcatttctctaataatcagtgacgagctttttttcatgtttgttggctgcataaatgtcttcttttgagaagtgtctgttcatgtcctttggccacttttgatggggttgttttttccttgtaaatttgtttaagttccttgtaaattctggatattagacctttgtcagatgaatagattgaaaaatttttctcccattctgtaggttgcctgttcattttgatgatagtttcttttgctgtgcaccagctctttagtttaattagatcccacttgtcaatttttgcttttgttgcaattgcttttggtgatttcatcataaaatctttgcccatgcctatttcctgaatgatattgcctagattttcttctagggtttttaaggttttgggttttacatttttcttatttaagtctttaatccatctcgagttaatttttgtataaggtgtaaggaaggggtccaggttcagttttctgcatatggctagtgagttctcccagcaccatttattaaatagagaatccttttcccattgcttatttttgtcaggtttgctgaagatcagatggttgtagatgtgcagtcttatttctgagccctctattctgttcaattgatctatgtatctgtttttatactcgtattctactgtttagattactgcagccttgtagtatagtttgaagtcaggtagaatgatgcctccagttttgttctctttgcttaggattgtattggctatacgggttcttttttggtttcatatgaattttaaactagtttttttttctaattctgtgaagaatgtcaatcatactttgatgggaatagcattgaatctataaattactttgggcagtatggccattttcacaatattgattcttcctattcacaaggatggaatacttttccatttgtttgtgttgtctcttatttctttgaacagtggttttgtaattctccttgaaaagatccttcacatctcttgttaactgtattcctaggcattttattctctttgtagcaattgtgaatggaagttcattcatgatttggccctctgcttgcctattgttggtgtataggaatgcttgtaacttttttttttaattttttacttatttatttttatttttatttttttcatgtttctttacaattttattattattatactttaagttttagggtacatgtgcacaatgtgcaggttagttacatatgtatacacgtgccatgctggtgtgctgcacccattaactcgtcatttagcattaggtatatctcctaatgctatccctccccactccccccaccccacaacagtccgcagagtgtgatattccccttcctgtgtccatgtgttctcattgttcaattcccacccatgagtgagaacatgcggtgtttggttttttgtcctcgcaatagtttactgtgaatgatgatttccaatttcatccatgtccctacaaaggacatgaactcatcattttttatggctgcatagtattccatggtgtatatgtgccacattttcttaatccagtctatcattgttgaacatctgggttggttccaagtctttgctattgtgaatagtgccgcaataaacatacgtgtgcatgtgtctttatagcaccatgatttatagtcctttgggtatatacccagtaatgggatggctgggtcaaatggtatttctagttctagatccctgaggaatcgccacactgacttccacaatggctgaactactttacagtcccaccaacagtgtaaaagtgttcctatttctgcacatcctctccagcacctgttgtttcctgactttttaatgattgccattctaactggtgtgagatggtatctcattgtggttttgatttgcatttctctgatggccagtgatgatgagcattttttcatgtgtcttttggctgcataaatgtcttcttttgagaagtgtctgttcatatccttcgcccactttttgatggggttgtttttttcttgtaaatttgtttgagttcattgtagattctggatattagccctttgtcagatgagtaggttgggaaaattttctcccattttgtaggttgcctgttcactctgatggtagtttcttttgctgtgcagaagctctttagtttaattagatcccatttgtcaattttgtcttttgttgccattgcttttggtgttttaggcatgaagtccttgtccatgcctatgtcctgaatggtaatgcctaggttttctcctagggtttttatggttttagatctaacatttaagtctttaatccatcttgaattaatttttgtataaggtgtaatggagggatccagtttccgctttctacatatggctagccagtttccccagcaccatttgttaaatagggaatcctttccccattgcttgtttttctcaggtttgtcaaagatcagatagttgtagatatgcagcgttatttctgagggctctgttctgttccattgatctatatctctgttttggtaccagtaccaaaagttttgattcttctttattaatcttgctagcagtctatcaattttgttgatcctttcaaaaaaccagctcctaggttcattaattttttgaagggttttttgtgtctctatttccttcagttctgctctgattttagttatttcttgccttctgctagcttttgaatgtgtttgctcttgcttttctagttcttttaattgtgatgttagggtgtcaattttggatctttcctgctttctcttgtgggcatttagtgctataaatttccctctacacactgcttcgaatgagtcccagagattccggtatgttgtgtctttgttctcgttggtttcaaagaacatctttatttctgccttcatttcgttatgtgcccagtagtcattcaggagcaggttgttcagtttccatgtagttgagcggttttgagtgagtttcttaatcctgagttctagtttgattgcactgtggtctgagagatagtgtgttataatttctgttcttttacatttgctgaggagagctttacttccaactatgtggtcaattttggaataggtgtggtgtggcgctgaaaaaaatgtatattctgttgatttggggtggagagttctgtagatgtctattaggtccgcttggtgcagagctgagttcaattcctgggtatccttgttaactttctttctcattgatctgtctaatgttgacagtggggtgttaaagtctcccattattattgtgtgggagtctaagtctctttgtaggtcactcaggacttgctttatgaatctgggtgctcctgtattgggtgcatatatatttaggatagttagctcttcttgttgaattggtccctttaccattatgtaatggccttcttcgtctcttttgatctttgttggtttaacaaatccaacaagtctctgttttatcagagactaggattgtaacctctgcctttttttgttttccatttgcttggtagatcttcctccatccttttattttgagcctatgtgtgtttctgcacgtgagatgggtttcctgaatacagcacactgatgggtcttgactgtttatccaatttgccagtctgtgtcttttaattggaccatttagtccatttacatttaaagttaatattgtgatgtgtgtatttgatcctgtcattatgatgttagctggttattttgctcgttagttgatgcagtttcttcctagtctcgatggtctttacattttggcatgattttgcagcggctggtaccggttgttcctttccatgtttagcgcttccttcaggagctcttttagggcaggcctggtggtgacaaaatctcagcatttgctttctgtaaagtattttatttctccttcacttataaagcttagtttggctggatatgaaattctgggttgaaattcttttctttaagaatgttgaatattggcccccactctcttctggcttgtagggtttctgccgagagatccgctgttagtctgatgggcttccctttgtgggtaacccgacctttctctctggctgcccttaacattttttccttcatttcaactttggtgaatctgacaattatgtgtcttggagttgctcttctcgaggagtatctttgtggtgttctctgtatttcctgaatctgaatgttggcctgccttgctacattggggaagttctcctggataatatcctgcagagtgttttccaacttggttccattctcccagtcactttcaggtacaccaatcagatgtagatttggtcttttcacgtagtcccatatttcttggaggctttgttcatttctttttattcttttttctctaaacttcccttcttgcttcatttcattcatttcatcttccattgctgatatcctttcttccagttgatcgcatcggctcctgaggcttctgcattcttcacgtagttctggagccttggctttcagctccatccactcctttaagcacttctctgtattggttattctagttatacattcgtctaaatttttttcaaaggttttaacttctttgcctttggtttgaatttcctcctgtagctcggagtagtttgatcgtctgtagccttcttctctcaactcgtcaaagtcattctctgtccagctttgttctgttgctggtgaggaactgtgttcctttggaggaggagagtcgctctgctttttagagtttccggtttttctgttctgttttttccccatctttgtggttttatctacttttggtctttgatgatggtgatgtacagatgggtttttggtgtggatgtcctttctgtttgttagttttccttctaacagacaggaccctcagctgcaggtctgttggagtttgctagaggtccactccagaccctgtttgcctgggtagcagcagggatggcttcggaacagtggatttttgtgaaccgcgaatgctgctgtctgatcgttcctctggaagttttgtctcagaggagtacccggccgtgtgaggtgtcagtctgcccctactggggggtgcctcccagttgggctgctcgggggtcaggggtcagggacccacttgaggaggcagtctgcccgttctcagatctccagctgtgtgctgggagaaccactgctctcttcaaagctgtcagacagggacatttaagtctgcagaggttactgctgtctttttgtttgtctgtgccctgcccccagaggtggagcctacagaggcaggcaggcctccttgagctgtggtgggctccacccagttggagcttccgggctgctttgtttacttaagcaagcctgggcaatggcgggcgcctctcccccagcctcgctgccaccttgcagtttgatctcagactgctgtgctagcaatcagcgagactccgtgcgtgtaggacccttcaagccaggtgcgggatataatctcctggtgcaccattttttaagcccgttggaaaagcacagtattagggtgggagtgacccgattttccaggtgctgtctgtcacccctttctttgactaggaaagggaactccctgacccttgcacttcccgagtgaggcaatgcctcaccctgcttcggctggtgcacggtgcgttgcacccactgtcctgcacccactgtctggcactccctagtgagatgaacccggtacctcagatggaaatgcagaaatcacccgtcttctgtgtcgctcagactgggagctgtagactggagctgttcctattaggccatcttggctgtcctctcagaatgcttgtaacttttgcacattgatcttttatcatgagactttgctgaagttgcttatcagcttaataagctttttggctgagacaatgggattttctagatataggatcatgtcatctgcaaacagagacaatttgccttcctcttttcctatttgaataccctttatttctttctcttgcctgattgccctggtcagaaattccattgctatgtttaataggagtggtgatagagggcatccttgtcttgtgccagttttcaaggggaatgcttccagcttttgcccattcagttgtgggttgtgggatattggttgtgggtttctcataaacagctcttattattttgagatatgttatgtccatacctagtttattgagagtttttaacatgaagggatgttgaattttatcaaaggccttttctgcatctattgagataatcatgtggtttttgtcattggttctgtttatgtgatggattacatttattgattgcatatgttgaaccacccttgcatcccagggatgaagccgactcgattgtgtaggataagctttttgatatgttgctggattaggtttgacagtactttattgagtatctttgaatcgatgttcatcaggaatattggccttaagttttctttttttgctatgtctctgccagattttggtatcaggatgatgctggcctcataaaatgagttacagggaagttcctccttttcaattgtttggaatagtttcagaaggaatgataccagatcctctttgtacctctggtagagttcagctgtgaatctgtctggtcctgggcttttttttggttggtaggctatttattactgcctcactttcagaacttggtattggtctattcaaggatttgacttcttcctggtttagtcttggaaatgtgtccaggaatttatccatttcttctagattttctagtatatttgtctagaggtgtttataatattctctgatggtagtttgtatttctgtgggatcagtggtgatatcccctttatcacttttttattgtgtctatttgattcttttctcttttcttctttattagtctagctagcagtcaatctattttagtttttcaaaaaccatctcctggattcattgatttttgaaggtttttttttgtgtctctatgtttttctattctgctctgatcttggttatttcttgttttctgctagtttttggatttgtttgctcttgcttctctagttttagttgtgagcacatcgctttttgaagccctctctgtttaggtgacagctggcatttctgtatatagtcacatgacaccaactgcaactgcaagggaggtggaaagtggagaggggcacatggatattcatggagcactgtctctaccacaaatgaaaactaaggaaaaatatcttcttatcctgtaattctgaactctgttggttctttgtggattttataggagtatcatagtgctttcaaatggtactgtggtttaggagctaggccaacttttgtgataaatactctaaaactgctaactatgggtcttaaatgttgtctaacttctcaataataatgataattataataatggtaataattatattaaaaataaaaactttgagagttttctataaccttataccatgcttagagcttacatagattatcttatttaacctttccactaataaaaagtagattattgccctcattctacaactaaagaaacaagggctaatattataaagaacttgcccaagggctcacagtcaggattttaaactggatagttagatgagaagctgcatttttaccctttgctaaagttctcagtctagagtttcttatttgttgaaaatagaatgctaattcttacacgaaataatttgttagacatctagcacattgcctgttactcatactagcttggtgcctaataagtattcaagcagtattagttccccaccttcgtatgtaaagaaggcaggcagaagccataccttcatatgtaaagaaggcaggcagaagccataccagctctactattgattactgttatatgctttccaacataattgaaaataattatcaaattatcaaacataatttaggtcttacaatttttgctgctttattgatttttcataattcattgattccatagaataaccatctctaggccaactaactaatgtaaaagtgaaattgattccaggatgtaaccctctgctgagagtaactcttcaaggaacagtgtgaggaaatgtgctcttgagagaacaaaatttaatcctaaatatcactaagtattgtctcaaatcttcccctttaaaactcatatataaggccaggtgctgtggctcacgcctgtaatatcagcattttggaaggctgaggcgggagaattgtttgaggccaggagttcaagaccagcctgggcaacatactgagacctcatctctaaaaaaaaaaaaaaaaaaaaaaaaaaaaaaaaaaaaaaaattatctgggagtggtggcatgtgcctatagtatcagctatcagaaggctgaggtggggagattgcttgagctcaggagttcaaggctgcagcaaaccatgattgtgccactgcattccaggctggatgacagagcgagaccctgtttctaaaaggaaacaaacaaacgaatctcatatgtaaataatttgatacatatttaaaatagattaagcacatgcctttttgccaccccagaacatcaggcattattttggctgactttgcacaacaatgttggagtggtatcatgaagcaactgaatctgctggtcataactatgagaatagatagctcaatatcttctgtgccaaaagcaggatcaagactttaggcaactggttttcggtatccaaatgaccatactaaaaaaatatccagcagattgactggctaattttccacaagtgcactttgtggttaatatttcttggctatcctattgagatagattaattttatacccatgttacatttaatagtgcccaacacacagtaggtgctcaataaatatttaacaaatgagtagaatcaggccctttaaatttcttggcatccatgaatatccagctttctatcaccacacaagattgtctaggtaaactagtacatggtttagcttacaaaaagaagagaacttgttttgaagtcagataaactttaattcatattaattggtaccaccaattaatagttctgagattttgagccaattaatgaacagctctgtatgccactttctccatctgttttgagtgttcactttaacatgtttaacataataaagagtatgtctatagtaggtaagcaataatactggttcaactttctttcttcccttgtgttattgagttgagagttaatatcatacaagtcatatgacacatatttctgtgactcactaaaaatatcttatctactgcctgttttttgatttcaggtttattatataaagaaacaattgaatatgttcttcctgaagtttagctgatgaattttatctttcctatgaattggtattatatattttatgagattaataaatcaaaacctgccactcactgtggttttgttgttgttattattttttttcctttggtgttccagaagcgtgacactaagttttgtgctcaaggcaatagatattcataacttaagtcttctggtaaaactgtcatctcctagcttgctttatttgacatttgtttttaaaactggatttaatggttttattgtttctctatcttttaccgtgagctagacaaatcctttatggaaccatacagaatataaataataaatgaaagaataaaatagtttgcccaaggtttcacagctattaagtgcagaactgatccaggctcagtgctgttttcagctatatcattcaaaagaaacaaagtttaacctccaaaaattcttaaacctcaatgtttcccactcaggaactgactatcagaaacataggacagtcattcacaaatgaaaatgaggagagaatgcttctgaaatataggctattaaagtgcaatcaaagctttggacacctgcaggagaagatcaataatgtgggacatttttctttgcaaaattctatggctataggctagcaattgaattgatgatgagtgctcaggtgctgataccaaggagagtcttttatgacattatttttaacttccacatcctttgtttacatgtcgatctgcattgcttccactttttgacttttaattattcctctttgaatggtggcatcttttatatctactattgtctaaaacagtgattctcaaaatgtgaaacttgttagaagtacagattcttggccttatcctagtattactgaatcagaaactttgcattttataagccccctagctagtcctaatccatgttaaaacttcagaatctctgctgtagaccaagtattggctaagcatgctttctcaacatgaatttttttttctttgtaggtttaaataatctgctgtcttgttctatgacttgaactcaggaaacactaaaatgtataactagagaaaagtcatttttagcactgataatatttttctgtagtgtgcttgatggaatattttcatgggcacattttataaagaaaaaattatatttgaactttatagtcatgacaaggaatactatatagaagctgaaggatgaaatgtagtctattaaatatgctctgaacctttcaaaactcaatttagatttgtaagcttagggcacagatgggatctgggggaagctctttaacacatcatatttgctatcaaatttttggttatgacatcaatctaagaaaatttcctatgctattatgtccatgccttaccgcttaaactagtaattaaaatagacttttaccaattatttgagatgctttcatgaacatcttccctaacttccaaattttacctgaagtttaattcaaagtgaggtataaagaagaaacttgaaaggaaattatatgtttatgtgtgtgtgaattcacaaaccttgtaatgatgatttttaattggttgattgctgatgcttgaatccaaatctccagaatgttatgccaatgacttgtattttatcaagccctgtttctccagtgtgcatccccaggtggttgagatgcacactcatatctgagaaccagtgaaaaggaaggttcagggatatttttagttggggaaaacacagatcaagtctcccctcaaacattacaactttatacctgtaacttggcttctagtagttgctgtatacatggtagctgattgaattaatgatattgaatgagcgcaggtggttagttgctactgtgaaagttgtcaaaatcagaatggagtcacttgtgttaaaaaaagaaaggaaaaaaccatgacaaatagaacagaggaaggccataaagagaagcgttcacatgcgtaaatacctggtaaaaactatcacaaagggctgaaaaacccatgagtttgcgccaagaccatcacaaccttatgcaaaaaatgtttctgcaaagacatctgcccagcaatttcctgtcccactttggactggcattacctttgttattgatccttgtagccaaggataattatctcaaaatagttagataatcatcctcatttttcctttaaaaacctctgttttcctttacctcctggaatacacacatagtttactatggcacatatactgccattgcaatactctattccagaatatatattattttatttctattatatagaaagagcccttttctgcttggtagtttctttttgctttcagcacttttttaattctgtagaatgtattatccatactttaactactttcttatttaattgtcttcattctagactgaaccttatctttttttggttatattttgagtgccaaacctagtatttggcaaataatatgtatatcatcagcatttgttgggttaaacagttctaaatattaaatagggtagctcttagagtaaacctgagagataagtgacatgaatcgttaagcttctttggtttatttgaatatacattgaaatgttggaagaggagagacaacaagttgaatcaactatgatatattgactgagaccatagctggaaaagccacagtgaagtccaaaggcacagggccgtgccacaatacaacattaagtcaggagtctggaacacaaagttcattgccaatgattagtttatacatgcaatacagttgagaaagccacacttccaaagtgaagggaataagtaagggaaggggagatatattttcttggtttggtgaggctagtgtgtgctaaagattttgtgtgtggtcagaaacagaatattaaaagatataaagaagggtcagaacatgacaaatggcaagttaggcacttcattcatcccaaattaaacttgacagatgaattcatgttatattctagctccagttgctttttaacctttcttagccaggaaaaaaagcagggctttattcaggctgttctactcatatgccaaaaagtctagagtagaaatggaccatggtgtggagagcagttcctggtactgtggttgaaatcaaggattgtttaaagactgatgttcttttttctgccactgtccacacccattgtctaaattctaaatcctgttgttgtctccttgaataggcttgcaatgtcctgatttttaatagtcttgtttaattccctatctcatgctccacaaactgctttcttgatttcagaacttttattattgcatttgcagatcacttaatttttggtttcctgtccaagcaacataagttcctataagtccactctattctttgaggtcttagtgcatttgcaatgaatgctgccaccatatccgatgcaatcttaggttggtgcctgtcacacgtattctactttcaagtctgtctcagtcttatctggaggcctcaagatcctagcactggatttgtaggttttgccacctgtgttcacatgggctccattgtattctcctcatttacatcactgatgctgcttggatccctttctaagtgaatatggggaaaattagatagtacttctatttcaagtttttatttagagatgaaatgccaaaactttccaggaaaaatagttttattatcaatccagaggttcagagcccaaggagatttaaatctttcaaattatatcagaattcgattttcagaaaagttagtgtatgttaaaattatacaaaaagtctttggtttagattctggactcagaacattataggcagatttttcactaattaaagctttggcaggacactcacaagttgtgaggtatgtgagaaattattcattgcgtgggaatgtctcacatctcacttcttgtaggacaaccagcattctttgacaaaccaaatcaatctaaactgtacctctccccttattgtggcattttaaaacctgcccacaaatctcctaaatgccccaaatgggtcaaaaccacctttaatgagaatcactggcatagattgtttaattttcagtcactgggattggggaggaacccacagaaaatgtgggtgcttaaaacctgaacaaaatcagcaagaagggtgactgctgggaaggcatccaccagtgtatgccacaggaatgggctagatgatattctgtgaggtcccttctagctatagaattcttactatttatgtcataagtacaatataagatcatttgtggataaataatcacaggtaatggatatttatattatacatatgtattatagttcaaaattttaaagacagactcatcaattactaaatataattgatagatgaacttctcttaaaaataaaaaatgcaacaattaagatatttaaaatctaagcttccaaaaaataaagtgtcatatggtattttagaataatattaattcaaagaagaattttgctatgcttaattcagaacaatagcatttgtgatattaatgaggacaaatgaagtcaagactgtttaattcaaatttacccaattaaaataattaaaactttacataagtttgtatcttagttctttctgagaaaaggttgtagatacaattttttatctgttctcatgtgactggtataatgggtgaccagtgatcatctttgtcttatttacttgaatcctgaaggatctaatatcacctctgagaccaatgcatgttcagtagctatagatgtttattctataaatgaatgtctctatgagatactttagaaaagattatgtgaatcaaatctaagattagtctattataaatagttttaatgatgaaaaaaacaatttctttgcattttttccctaagctcttttactcgaggtaatcttgcatggactgatacatattttttttctatgtgaacttcatgaactagatgatagatggctaagtgtcagtaatcattaaaagaacaagtttctgtacatctcattatcattctgcctgttcacttgcctcatgtttttgctgttcttctttttgacagggattcgataaacaagtggatgtgtcatatattgccaaacattacaacatgagcaaaagcaaagttgacaaccagttctacagtgtggaagtgggagactcaaccttcacagttctcaagcgctaccagaatctaaagcctattggctctggggctcagggcatagtttggtaagcggaatggatttgctgtatttttaaagggaacacaccgtgtgcaactactagacacaaacacacaaacaaacaaaatccccaaaataaatagcataatttgggagggaaaaataatcctactgaagaaaaaaaaataacattatgagcattatgtttaatttgttatccacttgctaacaatatatacaacttggcttgtgacatgttttttttttggtcagagaaaaaaagttattacacaagaatcataaagaaataaagagaaccagagattttctagcagttgctaatgtatttgtagagttttatttgttgcacagcaagaaatgaggggacatgtcttaagataacagcaaataaaactccttatatgctagagtggaataaaagctatttcaaatgtttctgtaacttttcaaattcagtgtttgaaactgagttaccgatttagaaaaagtagtattttaaaaatgtttgcctcatgtttccaaaatggaaagattctgggctgcttagtaacaattcttttatgacatttttgagtagctaattaaaattatgacaaatctagatctgatttacctaagactcttgcaaaattcatgatatcaggttaattgataagcatttcttttacacagttttaatttgtaatgtcacaaccaaatgtatttaatataaacttattagtataatcatttttaatctttctgatggctcacacagataagtaaaaattcagggcatgtaccctgaatatgtatatttatatatgtgtatttatttataaaggatatttatttatacaatatatttatttattactgctacattcataatgtccatttaaaaacacaaacacttttaagggatgagatgaatttacagcaaatcaccataaacttagccactttcttgctgatcttacagttctgtaggtcagaagtcctacaagatttcattttagcccagtggggctaagatcaagatggtggcaggctgggttcctttccggaggtgctggaagagaatctatttccctgatcatttgaattgttggcagatttcaattccttgcagttgtgataaaaaaaaagaggtttaaaatttaaaatattttaaatgttttaaagtttgtgtttaaatggctaagtttatggtgatttgctatgctagcaatattaatgcacatggtatagtaaagattctaatattaagacaattgctgtaactctcctaaatttaccagtggcgggagaaaaagagtagtttctggctacctttcttgatggaaaattgtagaatattaacatgagaaagttttcctgactaagattctcagtccaggtgctcaaatattaattgggatagtttcattttcctttgaacagacctgccacagatttgtggcagtgaaactgagtactgtcagtgaaagaaaactgatagacctttaatgactcaaaaatagatccaaagcagcattttgctcaggaagttaacagattatcacaaagatttgaacattttctaataattttgtagtatgttttataggatattttgggcctctatttctcctttctatagggtggaagttatctttggcttagatatagatactgcaaaattttttatattgcctttgtcaactgtgagctcatctgcctctcttatgtcaaatgcatccattcccagacatgcttctgaaatccacagaccttttctatgtgcacaactgtcagagtacataatatcttgaatgttccatgcaatcctgagtatagtgactggtgcaaactggaaactgggcatatctgagatctctgatggacagacaaactgaaacatatcattaatttattttgccttattttctttggagcagaaatacaacatggaggaaaaaattacaaaacagatatcatcatttttgtccatgtgtcaccgcatgtaattttgcatgtgtatgcaagagaaattctgcttttcaagcataagtattggcatatggatacctattatgtcatagaatctccatcctcctaacttgtttgaaatggagtctcatttctactgttctggttaccttaaacttgttattgggtttttacaatcttttcccccactttggactgttttatttcttacttatcagcatgggggaaaaggtaatactaaaatatcttcaaaagaagttattactatactatatttcatttaccattgatggtaggtcaaaaatgtcaatgttgagcatgattaaacaaaagctactgtgaaatattggaaaaaaatgaaaattttccttctgcctttgagggaaagaaaagattatctgttgaagcagaaacaatgagaattattctgcttcactgtgtgagctgagaagttctctacagcctcgtaggtggggaattgtagaataatctgcaagatgagtttttagcaacagtggtcaggatccagaagagcaactcattcagaacatttttccaatcatcagaagagggtctcattagtgttttttctgttaccaactccggaacaaaaacaagcatgggaagaaatcaacagtaggggtttcattgttttcactcacatctatcctgctgtttcttgccaagccaaggaacattttctactttctcatttctctctctaaagatgattcaaatggacagccaaagtggtggcaaaagttaacaactaagtttagcagagacagcttgccagggctggtctgctctttaactgaaaagagctgattgtatggttttaaatgaaaggaagtgaagccatattatttctgtcttggtggtgttacacaccatcagcttgtaagtggtcacaattcaattttgcaagatgatgttaggcaggatatttacagaaaactgtaagacgaatacaattctaagataaaatcatagaattgtaaaatatctgtaccttgaaaattaagtatttaaaaataagatgatacattttatgttaaccaacctttaaaaaaattccacttggagctagaggatggcatttaattaaagttgaaataatcatagttataagatgccctgggaataatccaatggattagtttatcttaaatggaatatatatccatgtatatgtatacgtacccgtatttgtggtttagctttctgtggtttcagttacacatgatcaactaggatacgaaaatattaaatgaaaaattccagaaatactttgtaagttttaaattgtacaccattctgaaatcttgccctgtctcactctatctcatcccatccttctggggatgtgactcatccctttgtgtagcatatccaggctgtctatgatacacctgttggtcacttagtggcagtctcagttatcagagcaactgttgcaatattgcagtgcttgtgttcaaatttttcttattttaattaataacggctccaaaatacaaaagtagtgatgctggcaatttggatgcagtaaagtgcttcctttaagttaaaaagtgaaagttcccaacttaatgaggaaagaacaaaaatcttatgctgagattgctaatgtcttcagaaagaatgaatcttctatttatgaaatttgaacagtatgttattgcagttgttctatttattattcttgtgaatcccctaccgtgcttaatttataaattacactttatcataggcatatatgtgtaggaaaaaacatagtatatatagagttcactattatccagtttcagacatccactgggggtcttggaatgtatctgcctcagacaagggggtactactgtaatgaatatgtaataccaatatacgattattatatattatatatacatacatattaatccggtgggttagtttatcttaattggttaggtatcatatatgtcattttaaatattatatatatgataggatatatatctttttgttttggacaaaaatttgaaaaaatcatttctggtgaatgtccttcaataagtggtctacagtaacaagactatgcagataaacaatttaagatataaattgccaggcatgttcagcagaaactcaggtgttcacatattcttctttgaaaaaaagttctcccttttaaatgtgctcattttcatttaaaaaaagacactatttactctgatgtgtttagcagctttttccattttgatgatgaatttgatttactccatccgcactctgatttaatcacccttgaactaataacatccatccacaaaatgattggaaaaggttgggaacatcttccctaaagggttggtaaatatgcaccagaacaaaagtgattgaaagttggccatgttagggtgcatgacagaaaggtatttaatatatatttcttgctgataaaaattacgagaaaaattgatgaagttctcaggattctgttaaaatttgcatatttaaatattatagattcaattgtcagtactttaagataccttatattatcatctttagtaattatagttacaaataaacttatgccgaaaaaatattttttttcccattgtggtttatcagtgatagcttttaactttcagtctttcagaatctaggtttactcatctgtaaaatggattttctcataggactcaggagagtacaaaacaagctagatacataaaattgctttataaatctgaaattgtcgtgacttttagtagattcaagaaaggaaggcttatgatactttttcttaacaatggaaaattgtaaaggtcagcacatgtaacctaggaaaatgcctgatggtaacagttgcttcatcatcacactgtgtatattgtatacatattacagttaagagcatgggatttaataaaataactttactaatactccatcatggaggctggcagagaagcatttgaactttttttttctcctatctttcatccagggcttcagttaaccaatattatttacaatatgttagttgtaaacattagtttttaaatctgcagcacaatttcacagggccagctaaggatctttaagcacagaatatggatgggagcatcttatggttatgaggttggtgacatgaagagagatgggtaagatcatccagaggttttccaaagcatcactcttcctcaataatacaaaacagacttgatcagtgggccccagatgattttattttgtttctgcaaacattactcaagctcttgtggcacatttctcttaagagtttctaatgagccattacgctaaatgacacggatttaatcacacatttccatttagcccctgaccagtggaaatgattatcctctcatgtacatctgtaatatcagcatattcttcatccctggcattttccattaattttaaaattttggacccttaatcgcaacctccttgaaataaggaacactgagcttcaaaatactgtcttttatatatgtagcaggtttaaggtggtgatggcccagcagaataggacagaattagacactgtattcttccacattttgctgttctcctaggcctctttgcacagtacaggccacacatatttaccatatttctcaattgatcaataagactggtaaatgtcattttttttcctttacgaagaaaatgtggtgttttgaaaagcaatgtgtagaagtttgatggcagtatatttacagaaaaaacaattatacatatatgtaatacccacatttctatgtgtcaaccataaattatatgtgtgtccttatgtataaatatttaattgttgatgtgataactaatgctgaaggggttggtaattcataatcttaaaaattatttttggctttggaatgttttgtggacatttattctgaattctgtcattcttcagttaatttgtaattaacttacatccctgtagtaaaaactgacagcaagagtttgtagcctgggagcacttttcttggcagatttgaaaaatagtcatttaaatttccatagataattatttacttacagatgattgagtcttttctgtaaatcatttgttgatataaatactaatgtccctattagaagaaataattagtaaatacattatttatttttcagtttcaacttccctcctaaagattaaatagttaagtgatgctggttcttattttttttagaacttgtcttttagggcatcagtgaatattttcattgtggaattaaagtcagtttatagtccatatactattttttcagattaatcctgattgttaggattaaaatgtatccatggttatgttaaaaagtaacctacagcccaaatataaatatctaacaagttaatctagcaccatccagtgcatcttggaaaagccaaaattcctcacagaaaggaggcagtttgatcagttgaattaaattatgctaaataacaggtggcaatggctgtccctcagattctgggaagcattctcatttactgctctaagagacctgtgcattccatctgtagataagctggctttgttttttttaaaaaagatagtaggtatgtgttataaattttgtaacgaaaaataccaaggcttagaggagctttttatacagctcagagggaaggtagttggcccttctctctactaagtcatgcttctggcctgttacagcattactttctgtttctagagtctgagctgtctttgctaatcatggatttgaatgtgggggctgaggacaaaggaagacatcttttagtttggaagatggagtgacagccctatcattccctttgtgcgctctctgcctctcctgtgatggaatttaaatttatttaaaatatttgaccttgtcaagtaagtttcactttacatgtccaaagttatgaatccagcattgagccattgcattttaagcttctgtgtatgacaggagagtctaaattatcatcagggaaggtactcagtcacttcatttgacatttatttaaatacatgtaccttagggttcttgtgctgtgctcttcttcatttctattcttctttattttttatcattaaaaacatttttcacagattttaatatgtccattaataaaatcatgatttcactctcaatccagggagatgcaaccccaaatatatttttaaaagttttcctttgggttcaccaaggacatcagaatatggatgggaagtgtgagccctgcacaagaggactgagatgagggacttgtacgggcggaactccagcctgggctctacccgtggactctgatacgtggtcacctccgcctcgaggagctgctttttctcacacccacaccaggtgggctggcagcaaatattaaatgaactttagatttgaagtgaccatgacagaaactcagtttaactagcaaaaatataagttgcaaaatacttagtttacagaagatctaatacatctgggatgttaaataattcactggcatgatgatttaagacacctgaagaaaatgcaaataatcagggagcagaggaaaattataagccaaattgttgtcatgttaacattctcccttctcttcagtgaccctgcttctctcatcccttttccctccctacatctttttatggacatctctctttcaaggcatccctgttctctgaacctgtcacactcctgctggattaactttttcaccatctagccaggaaccatgaagagtgatttcagacactctcagatgctctttattttctcacctccttgtcctctgaagctttgttttccaaactctcatccggatcagcccaagtggctgttttctctgctcctgctggaaggctgagcccagctggaggaatgatataatcacactgatttcctccattataagtttatgagcttcatcctcagctgggcccttgttcctgctcagcaaccattttgcatatatgtctcgtcagctccctagccatttcccaaggcggctgttacaatccttttacaactttcatgaaagctcccaattccacttcaccagcaacattctttacagaaggtcttacctcctacttccctgagaaaacagatggactcaggcatgtaaactctcaatttccccttcaatctcctaactctttgtcatctccagtcttccctgcccagttagttccttcatgagggacaccgtcaggctggccacccacctgtgttcttgattccatctccacccgttgggacctattagtttttgtctgtcttgcattgactgatgcttcttctcccctgcctatggacgacctctcaccaaattctcatctacaaaaaaagttatttagaatgtgcctacccctcaaacaacccctctttctctccttccctcatcatcacacttcttgatagtctgaagttaatgcctccacatacctttttagttctcattttacaagcagttccaattcttttttttgagacggagtctcactctgtcgcccaggctggagtgcagtagtgcgatcttggctcactgcaagctccacctccctggttcttgccattctcctgcctcagcctactgagtagctgggactacaggagcccactgccacgccctgctaatttttttgtgtttttagtagagacggggtttcaccgtgttagccaggatggtctcgatctcctgacctcgtgatctgcccgtctcggcctcccaaagtgctgagattacaggcgtgagccaccgcgcctggccaagcagttccaattctatcacattacccctgtggaggaggatgctctggggaggcaaccattgacctcctaagtggctaatccattggcttctttttcagctctcattttattattattatttttatttcaatggcttgtgaagtacaagtgagatttttttgttatatggatgaattatatagaggtgaattctgagattttagtgcacccatcacccaagtggtgtacatgttacctaatgtgtagttttttatcccttgaccccctcttaccctttttctcctgagtctctgaagtccattgtatcacgctgtatgcctttgtgtactcacagcttagcttccacttttgagtaagaacatacaatatttggtttaacattcctatgttacttcacttagaataatggccttcagccccattgaagttgctgcaaaagacatttcattccttttaatggctgagtggtattccatggtgtatataccacattttctttatctacccatcagtcagtgggcacttacgttggttccacatctttgcaattatgaattctttggctcccgtttttttttacttttctgtaatatctggaaaggttaaatatccaattcttcttgaattctatcttcttttgaattttaagctaagaattttaaaaatctggggctcgtttggaatgggatggactggccaacatactgagggctgtgaaaggccgtggttagagtgcagactctaagatcctggctccctcttacctgtgtgggatctcaggaactttatctgaagatggggctggaagaaataactatgtatgcacagaattgctgttaaagcaaactaaattagttaatacagtgcctggatttacttagcagtcagtgcctgttagttttcattattgtagctggcctggcttatggccaggttctcagaggttggtttgattagggaactgtcttttctagttcaatgttcagaatgccagtaaaataatccaatccaggttgggtgcggtgactcgtgcctgtaatgctagcactttggcaggccgaggtgggtgtatcacctgaggtcgggtgttcaagaccagcctggctatcatggcgaaacctgtttctactaaaaaatacaaaaattagccaggcgtggtggtgggtgcctataatcccagctacttgtggggctgaggcgggagaatcgcttgaacctggggggcggaggctgcagtgagccgagattgcggcacttcactccagcctgggtggaagaatgaaactccatcaaaaaataaataaataaataaacaaataaaatccaatccaaagccactgaggccaagatttgaattggtggccagagcaaaaggagtcagaaagacaggtactaattttcaagcctaatgagaatgagattctaaatgagagaaggaaggcaaaagccaagaaccaggccagaactggatcaaagtgggagaaatttgggaacaatggaatgaatctagcacatatgtcatgaatattattggctggtggttgaatgttaatgctattagactaggttgaagccaactgtttcctggtgccctcctacctctatggtcaatcattatctaaccttttattgatcatctgtctctacccttcaaatatttgtattttaaaagtgttcttcctcctttgtgcttgcgtttttcacagttcaatgcctgatgtcttctgtcttttggctgtactttacttctaagccgttggtccatgaattatttctgtactcttatctccttcagattcctccacagatatctcaaattcagcatgcccaatataattttatgatcatctactcaaacttgcccttcacgatgtatttcttatttgaggattgctattccttcagttgcctcagttaaaaattacggagtcatagtttcttcctttctctttccagattgagtctaattgtttctatttctgaaatatcccttccttccatttcaactgccttttccaggtcttcatcataccccgctgggctatcatcatggatagttaactgatatccctttccccctccttatctcttcttctcctagtccgtcttccatactgcttatgggtaaagttgcttacacaataaaattcaaatattttggaagggcatactagtcattgttctcaaatgtgctgaccacttttatgcttcgggtatttatatgaagctattttctttcacctgaatgctcttgacatgcttgccattttccctgggaatccctgggaaattgctctcattttcacatttcagttatggggtcaccttttctgcgaagtctcaagtcaccttttctactgctcagcaaaagtaattgccctctcatctgtattattatgacatgttatacttacatctcttttggaactctttatatttttattgctattaaaatctgtgtctgctgctagatgatgatctccttgggacaaggattctgactttctcatccttatagtctgaagatttcaaaaagtgcctgttgcataatgttaactattaaatttatcaataatgtaatgtgtatgtttgaatgtgtgtatagtatgtatcagataaatagtatgacccactaatttcaggagtaatacatcaaatcataaaatgtactaataacggaggctagcatcacctgtaggaattagatactgttgtatgcaaacatcaattcaattattagaataagtctaactttctcttaaattatgcctttgactaatctgaagaatgagttagtaatatgaaaattgatttttcaaatcatttattaaatactataccaatttatatctgatttgataataaatatcacagatatatggcaaattttaaaagaatcattaaatagtacaatctgaggacttgatacaaatttactaaaagtattctttcatattttggtgtcaatgtaagagagataaatagtcactataagttaatatttatggtatccttacagaatgtataacattagtatcataagtttgggaaataagacatgaatgtcattgatatagctaaactcagtattggaggtatatttattagtgcctggcacatgaggagctttactagatttaaaggagaatgaagaaatgaaaaaaatgcaaatgatggtggttgtctagattcattgtttgtaaactgaaataaaggaaaaagacatttgggaggctgaggcaggcagatcgcttaagactggaggagtttgagaccagcctgagcaacatggcaaaaccccgtctctaccaacaaaaacaaaaattagccaggcatggtggcatgtgcctgtggtgtcagcgactcctgcggctgaggtgggagaatcccttgtacccaggaggcggaggttgcagtgagccatgatcatgctactgcactccagcctggctgacagagcgagacactgtctcaaaaaaaaaataagaagaagaagaaaaaaagaaaaatatattaatcaaaacaaaataaaaaatttaatcccatactaagatcgctcataaatgcactttccttcagtgggtttttattgagttactgactcatattagacactgggctatgtcatagtgatataaagttgaatagaaaggaccaaagatcctgccatctaatcaagagattgatgtaatacataaatgccatcacttttcttgggctagtttcttcacatccttcagttcatatacattggttaggataattttggctgctgtgacaaattgaccaacagaaaatgatagaagctcaaacataatagaagtgttcttctcatttatcaggtggaggtggaagtagataggggaaagattttggttctgttcagtgagctgaggagagagactgatgaaagctctggcatattcatcttgtaacgtgtaagggctccaaacagccaaaagcatggagctacttctgtgggccaggcctggaagtggtgcgtttcccttttgctcacattccacctgctagaactctgttaaatggctataacctaactgcacaggaggctggaaatgtcatctagttgagctgtgtgcccaagaaaaggaaaaagactaggattttgcagtctttgccctctctaaaatgtctatcatcctcctaaatccagtgccagtacccctctgaccagcttctacataaccttgtattttcacaggattattagcatcatcacattatttttacattgtctccttacattgtccatttcccactagactgtaagctccataaggaagactgtcaggcttgccttcagttgaatttctaactctaacatagttccttgcagagtaggcacttaacaaatattggagttaaagttctgattttcctttctacatctgttattcactctcagctcactggaatccatttctatgcactctactctgttgaaactgctcttgctaaattaccagtaaaccaaccaaaatgctaaatgcagcaagtagtctctggtctccatcttatttgatttggcactttggtactgtcctcttcaaggtttacttcttagtttttcaactgtattttcccagttcttagacggactccttttctgtgaaattggtggtgcaaagaagagctcttgggtgttaatagcttgcaacctcaaaggtaaagaaggtctacatttttttttaatggcaggagagtgtgtttactctattagagaggaaatgctggatgttacaggtaaggcatgtggaaagaaaaacagaaagagagagaggctctgagacagagtaaaagaggagaatgagacagagagacagaagaagaaagatacacagaaatagcaagaaagagagaaatagatgacagatacacaatgaggaagaggaagagagaacacacagacagagagatgtaggaacatcaagcaggcagctgagagattcccagagagaaatggagagactcaagaaaccaaaaataattgttagagaacaatttcggaggaagcaggatggtacatatagaagtagctttgaaaagaagcagtaattctttgtgaaacagaaacattgagaaatactatttttgcttacaataacacatgtttggtatgctgtataatatttcatcactaattttctaaaatcatcaaatagagatagaaattttttttttttttttttttttttgagacggtgtctcgctctgtagcccaggctggagtgcagtggcgcgatctcggctcactgcaagctccgcctcccgggttcacgccattctcctgcctcagcctcccgtgtagctgggactacaggcgcgcgccaccacgcccggctagagatagaaatttgaatggaccaagaaatcttttgacccttgtgctacataggaaaaagcaattgaaaggaaaagtagaaaaaaatactagaaaagatcactggacccagagtaatttttgtaaaattgccacttttctgcttcgttgtattttaaggaggataaaactaattggtagaagtgctttatcattgatatcttttttgtttttttgggttttttttggtaaacatattaccgggtagggaatagaaacttagacttagctactgtgtccatagtgtgcaaatttatccaattgtgttcatagagttgtacttatttagcagctcactgtaagtttttaacatttgtattcctttatttttgtcctgaaagcaaacatggagtttctggatcagtggcagagtattattactcaaggcaataattatatcagttacccatgtctccttcactccattcagtgcaatattataaaagacagatgttatcctacacatgcaaagggatttttgcattatcaataagaaattatgaatctcagagtttatataaggcctgctatacagctgccaccttgctaagaagagagagagaaggaaagagagggagagagatctaattttcctaaagtaagtattctctggcaggagaaagagaaagtccctattttacaatcatttggaatgtaaatgtatgctctgggattcacccactttgaaatgaaaacaattttttctctagaggttcttctatactctttaacttccaagacttgtcctttaaccagattcttgctttatctgctcaaagagccctgacaatgcagaaatattaaaatatctctatgatgtaggtattattatttacattaataatgtaaaattccagtcttataaagtaatatttctggattcaaataatcttgtaaaatttctatttaaaaatactttaaaataactgtattataaaaacaattgtttttaacaacccctacttaactggaacacaagatcttttaatgttttacttaaatcaatttataagtgcatgtgctgtggctatatacacatatgtgttaagtgtgcagaaatcaaaattacccccttaaacacaccccccaaaaaagataccagtaatttggcaccttctcacaagaatactgctaactcctcttgtatgcattcaaaaaatatttagcaatttagtatgattaattgaaactatgctgttttcacccttattctctaataagcttaggatctgataactattctacttggttatcaaaaagcatgccagaggaattttagcttttgcccatgtgagattttttttctcataaaatatatgtctggagaattgaaagaatgtgtattaataagatgttgtaaaagaaagtcattctttatttcatgtgtatttcctcatatgcaatgatttccttgaggttgggaatcacatctatttcattatattccattccatttaatacattttaatgaagcacttaatatgttccagatactgtgttgtatgcttgagctactgtcatgagcaaaagaagacatggtcctcactctctttccaagttttggtctagtaaatagaatctggttgtgggtatctatattacaatatactctgaaatattctaacaaagagacacatagtacagtgacttgaacacttctctcttccactgaagtctgagttcctgcatagttccagggaataggacaattctgtttcacagaaacacaggaatcctgacagtgttgttctgtccatgtgaccaaagccactagggtcacattccagtttatggaaagagaaaaaaagcaagtggagagcaagctgtctttctataaggatattgatatggtttagctgtgtctccacccaaaatctcatcttgaattataatccccataatccccacatgtcaagggtgggaccagatggaggtcattggatcatggggacattttcccccgtgctgttcttgtgatagtgattaagtctcaggagatctggtggttttacaagcatctggcatttcttctgcttgcactcactccgtcctgccaccctatgaagaatgtgcctgcttctcctttgccttctgccatgattgtaagtttcctgagacctccccaacaatgtggaactgcgagtcaattaaacctctttcctttataaattacccagtatcaggtatttcctcatagcagcatgagaatggactaatacagatatgacctagaagttgaatatttctcttctgccctcacccattgtcttgaacctaatctagctgtaaggaaagctggaaatatatagttagctgaatgccatgtgtctgtgtaaaactagggaagttcttataaccatgaggagggagggaatggatcttgggagaccattagactctgaaatagcaaatcttccatttctggatctggtaactgatatccagtccctctccttgttcatctgactttgatgtatgggctttgcttcaaatcagtgtgggttttacttcttgatccttctaaattgtgtcccagccagctgcattatatggattagagccaatagcttctcaagaaataaaacaatctaacataatttatatgacaaatgaaataactagtgtcttgctagaatgatgcaatcaccctgtttgtctccctcaccctgttttcccaagacctatcacagtgtcttgaacataagagatactggaaaaaaaaaccttcattgaatgaatgaatgaatgatgaatgaatcctctagaatgtaaatggatagctctgggtttcacctgctttgaaatataaacatgtgtctctctggcagtctctctttattcattctttaacttccaaggcttgtccattaacgcagctccagttttcttcgtttagcaaaccctaccgatgcataaacattagcatacctctctgaggtaggtacttgctgtggtttgaatatgttttgtttttcccaccaaaactcatgttgaaatttgatccctggtgtgtggttgttgggatgtggggcctagtgggaagtgtttaggtttggcggtggatccctcattaacttcttggtgcagttcttacagtagtgagtgaatttttgctcttgagagattggattaattcttgcaggaatagatcagttcccaagaaagtgggtcgttttaaagccaggatgcccctcagttttcctcctctttgcacatgttcactttccctttgatggtctctgccatgttgtgacacagcacaaaagcccttgccacaagccagggccatgccctggaacttctcagcctgcagaaccatgagctaaataaacttcttttcaattacccagtctcaggtgttctattatagcaacacaaaatggactaagataggactgtcatacatattagtaatgtaaaattctagcctttagcacataaagaaacttataggctacattttagatttagcctatacatttgctcaatgtgtatttttaaaagtgtattctctatcaataaattctacagagctttttctcccatagactctgtaaaatatccaggcctatattattattaccccaggaatggcttttctttctgttttaagatgctatagcgcaatgttaatttctttttcttgcattctataactgatagtctttgctataataagagaatggtgtcttaaacttcttctggctagaaagagtaagctaccagtggtgtagaaactgaagacagaatactcccccacactgaataaagatgtggacttcatgacacaatttcctcaggttaaaaaagctcagggggttatcttgggtcactagatttgaggcatttgctgtagctctttgtgccttgttcagcagttaactatctcatgttcaccataggactatcattttaatattttttgtaagataccagtgtcatgtttttgtaaactatatcctttctgtaaggtaatgaatcattctgagcttgacttgtatgttgtggtgtgggtgaactctttagaacatggtacaaggccttttaaaacctaagtcacaaataagctgaatgactttgaacaagttaattgtatttttaggccttaatttcctcatgtctaaataaaatgagggtattgggtattggttcaatgattaatggtctttctagctaaaaattcagtctggatatgtagattatttgctatttagagaaatgcataatttatgtttccttcctttttgaaaattgctgttgacaaacacagtgcttttgacactttgcaaagtatttattgtgcatctagtaagaaactgaacttgggagcctgggaagtaattactaagtctctagcagccaatagttatgcgtgcatgcgtgtgtgtgtgtgtatttgtgcacacctgcctgtgcatacacatgtatgtgtaatttgtagctggttgaaatcagaatgcatacataaatttcctttaatttttttttttattattatactttaagttttagggtacatgtgcacattgtgcaggttagttacatatgtatacatgtgccatgctggtgtgctgcacccactaactcgtcatctagcattgggtatatctcccagtgctatccctcccccctccccccaccccacaatagtccccagagtgtgatgttccccttcctgtgtccatgtgttctcattgttcaattcccacccatgagtgagaacatgcggtgtttggttttttgtcctcgcaatagtttactgtgaatgatgatttccaatttcatccatgtccctacaaaggacatgaactcatcattttttatggctgcatagtattccatggtgtatatgtgccacattttcttaatccagtctatcattgttggacatttgggttggttccaagtctttgctattgtgaatagtgccgcaataaacatacgtgtgcatgtgtctttatagcagcatgatttatagtcctttgggcatatacccagtaatgggatggctgtgtcaaatggtatttctagttctagatccctgaggagtcgccacactgacttccacaatggctgaactactttacagtcccaccaacagtgtaaaagtgttcctatttctccacatcctctccagcacctgttgtttcctgactttttaatgattgccattctaactggtgtgagatggtatctcattgtggttttgatttgcatttctctgatggccagtgatgatgagcattttttcatgtgtcttttggctgcataaatgtcttcttttgagaagtgtctgttcatgtccttcgcccactttttgatggggttgtttgtttttttcttgtaaatttgtttgagttcattgtagattctggatattagccctttgtcagatgagtaggttgagaaaattttctcccattttgtatgttgcctgctactctgatggtagtttcttttgctgtgcagaagctctttagtttaattagatcccatttgtcaattttgtcttttgttgccattgcttttgatgttttagacatgaaatccttgcccatgcctatgtcctgaatggtaatgccttggttttcttctagggtttttatggttttaggtctaacgtttaagtctttaatccatcttgaattgacttttgtataaggtgtaaggaagggatccagtttcagctttctacatatggctagccagttttcccagcaccatttattaaatagggaatcctttccccattgcttgtttttctcaggtttgtcaaagatcagatagttgtagatatgcggcgttatttctgagggctctgttctgttccattgatctacatctctgttttggtaccagtaacatgctgttttggttactgtagccttgtagtatagtttgaagttaggtagtgtgatgcctccagctttgttcttttggcttaggattgacttggcgatgcgggctcttttttggttccatatgaactttaaagtagttttttccaattctgtgaagaaagtcattggtagcttgatggggatggcattgaatctgtaaattaccttgggcagtatggccattttcacgatattgattcttcctacccatgagcatggaatgttcttccatttgtttgtatcctcttttatttctttgagcagtggtttgtagttctccttgaagaggtccttcacatcccttgtaaattggattcctaggtattttattctctttgaagcaattgtgaatgggagttcactcattatttggctgtttgtctgttgttggtgtataagaatgcttgtgatttttgcacattggttttgtatcctgagactttgctgaagttgcttatcagcttaaggagattctgggctaagacaatggggttttctagatatacagtcatgtcatctgcaaacagggacaatttgacttcctctgttcctaattgaataccgtttatttccttctcctgcctaattgccctggccagaacttccaacactatgttgaataggagtggtgagagagggcatccctgtcttgtgccagttttcaaagggaatgcttccagtttttgcccattcagtatgatattggctgtgggtttgtcatagatagctcttattattttgaaatacgtcccatcaatacctaatttattgagagtttttagcatgaagggttgttgaattttgtcaaaggcttttcctgcatctattgagataatcatgtggtttttgtctttggctctgtttatatgctggattacatttattgatttgcgtatattgaaccagccttgcatcccagggatgaagcccacttgatcatggtggataagctttttgatgtgctgctggattcggtttgccagtattttattgaggatttttgcatcaatgttcatcaaggatattggtctaaaattctcttttttggttgtgtctctgcccggctttggtatcagaatgatgctggcctcataaaatgagttagggaggattccctctttttctattgattggaatagtttcagaaggaatggtaccagttcctccttgtacctctggtagaattcggctgtgaatccatctggtccttgactctttttggttggtaaactattgattattgccacaatttcagctcctgttattggtctattcagagattcaacttcttcctggtttagtcttgggagagtgtatgtgtcgaggaatttatccatttcttctagattttctagtttatttgcgtagaggtgtttgtagtattctctgacggtagtttgtatttctgtgggatcggtggtgatatcccctttatcattttttattgtgtctatttggttcttctctctttttttctttattagtcttgctagcggtctatcaattttgttgatcctttcaaaaaaccagctcctggattcattaattttttgaagggttttttgtgtctctatttccttcagttctgctctgattttagttatttcttgccttctgctagcttttgaatgtgtttgctcttgcttttctagttgttttaattgtgatgttagggtgtcaattttggatctttcctgctttctcttgtgggcatttagtgctataaatttccctctacacactgctttgaatgcatcccagagattctggtatgttgtgtctttgttctcgttggtttcaaagaacatctttatttctgccttcatttcgttatgtacccagtagtcattcaggagcaggttgttcagtttccatgtagttgagtggttttgagtgagattcttaatcctgagttctagtttgattgcactgtggtctgagagatagtttgttataatttctgttcttttacatttgctgaggacagctttacttccaagtatatggtcaattttggagtaggtgtggtgtggtgctgaaaaaatgtatattctgttgattaggggtggtgagttctgtagatgtctattaggtccgcttggtgcagagctgagttcaattcctgggtatccttgttgaccttctgtctcgttgatctgtctaatgttgacagtggggtgttaaagtctcccattattaatgtgtgggagtctaagtctctttgtaggtcactcaggacttgctttatgaatctgggtgctcctgtattgggtgcatatatatttaggatagttagctcttcttgttgaattgatcactttaccattatgtaatggccttctttgtctcttttcatctttgttggtttaaaatctgttttatcagagactaggattacaacccctgcctttttttgttttccattggcttggtagatcttcctccatccttttattttgagcctatgtgtgtctctgcacgtgagatgggtttcctgaatacagcacactgttgggtcttgactctttatccaatttgccagtctgtgtcttttaattggagcatctagtccatttacatttaaagttaatattgttatgtgtgaatttgatcctgtcattatgatgttagctggtgattttgctcgttagttgatgcagtttcttcctagtctcggtggtctttacattttggcatgattttgcagtggctggtactggttgttcctttccatgtttagcgcttccttcaggagctcttttagggcaggcctggtgggacaaaatctctcagcatttgcttgtctgtaaagtattttatttctccttcacttatgaagcttagtttggctggatatgaagttctgggttgaaaattcttttctttaagaatgttgaatattggcccccactctcttctggcttgtagggtttctgctgagagatccactgttagtctgatgggcttccctttgtgggtaacccgacctttctctctggctgcccttaacattttttcctttatttcaactttggtgaatctgacaattatgtgttttggagttgctcttctcgaggagtatctttgtggcattctctgtgtttcctgaatgtgaacgttggcctgccttgctagactggggaagttctcctggataatatcctgcagagtgttttccaccttggttccattctccccatcactttcaggtacaccaatcagacgtagatttggtcttttcacatagtcccatatttcttggaagctttgttcatttctttttattcttttttctctaaacttcccttcttgcttcatttcattcatttcatcttccattgctgataccctttcttccagttgatcgtatcggctcctgaggcttctgcattcttcatgtagttctcgagccttggttttcagctccatcagctcctttaagcacttctctgtattagttattctagttatacattcttctaaatttttttcaaagttttcaacttctttgccttttgtttgaatgtcctcccatagctcagtaatttgatcgtctgaagccttcttctctcagctcgtcaaagtcattctccatccagctttgttccgttgctggtgaggaactgagttcctttggaggaggagaggcgctctgctttttagagtttccggtttttctgttctgttttttccccatctttgtggttttatctacttttggtctttgatgatggtgatgtacagatgggtttttggtgtggatgtcctttctgtttgttagttttccttctaacagacaggaccctcagctgaaggtctgttggagtaccctgccgtgtgaggtttcagtgtgcccctgctggggcggtgcctcccagttaggctgctcgggggtcaggggtcagggacccacttgaggaggcagtctgccccttctcagatctccagctgtatgctgggagatccactgctctcttcaaagctgtcagacagggacatttaagtctgcagaggttactgctggctttttgtttgtctgtgccctgcccccagaggtggagcctccagaggcaggcaggcctccttgagctgtggtgggctccacccagttggagcttctagggtgctttgtttacctaagcaagcctgggcaatggcgggcgcccctcccccagcctcgctgctgccttgcagtttgatctcagactgctgtgctaggaatcagcaagactccttgggcataggaccctccgagccacgtgcgggatataatctcgtggtgcgccgttttttaagcccgtcggaaaagcgcagtattcaggtgggagtgacccgattttccaggtgccatccgtcacccctttctttgactaggaaagggaactccctgaccccttgcacttcccgagtgaggcaatgcctcgccctgcttcggctcgtgcatggtgcgtgcacccactgacctgcgcccaccgtcttggcactccctagtgagatgaacctggtacctcagatggaaatgcagaaatcactgtcttctgtgtcgctcacgctgggagctgtagactggagctgttcctattcggccatcttggctcctccccccaattttactttaatttgaatgacaaagataatatgtaattattaccactaaaagtaatattttttcattttcctaacttcttatgatttggaaattttgaaataactgaatgttgttatcagcttacacatcaaatacaagtaacaaactggaaaaagtatgtgtggtgtgtggcaatatgataatgaaatagagggcaggggtggagactttaatgcagttttgcaaaatctgattattaattgctattaatggagtttgagttagatattttcaatttttcagagaaattttcaatttgtctggctggctagattagtggtctataaatatataatgtagttatcacacttctagtttccttgaaaatatacataggaagggaatggttaatgaaattagagctacagatacttaatttgtagagagattggctcttcagggagatgaaagatatcttcaaatatttgaagtcacaagtgtcaataaatgtgtagacttactcagcttgactccagagcacattcacagaattaataggacttagattttggctcaatgtaagaaaataattttatcagagtgaaagctattcatcatgggttggcttccttgtgaaggtgtaagcagttggtgactgatagtttgcatgcaaaagatggccagatgaacatttcttaggaatattgtactttacatagaatttcttcatttggtagaatgttggattaaatgaaatcttaaattttcatcccattctaagattacatatttttttgttacccgagaatcattatttatggactaccaatgcttttaagcaaagaatctctagccacgatgtgtctgaggtactttgatgttcagatttggaatgggttatctcctcaacttatttaccacatggtcagtaaggactgacttaatctcagttggagccaccagcaagatgtctggctcaacacccaaaatctgagccaaaagttctggctaagtgtgatagattcatacgtgttaatacccacaaaaagagttttttagagttcaaattctcttctaaacataaaactgtagacacatttatttgagaaaggtcaagtagtttagttctagctcttggtcataccctgtaaactgttttggctgtaggcattaaaaatttttatgttgcagacaggaaaatttgtattatgattgcacattaagcttataaaattttggagctccctctttaagaaaaatcacaaatacaaaattaagaatgaaagtgaattatttacttagaataaatacattacaacaaatcacaaattgtaaaaaagctgataaataccacagaatcataaaatctaaaaagataatactttatttttcagctctctgatataataccctttttactatatacttttggctgcatactcttttaatatgtctccacatgaagatgattttgtaatatcattatctgtagagaaaacagaaattcagtatcttccatactatgatcagtttaaacatatcttttgttattgatagtttggaaaatatttttttcagcttcacaattcattactgataatgtcatatacatgtttagaattgtcaaatttgagtggtctccaacctttttggcaccagggaccgatttcgtggaagacagtttttccatgggcctggggcttgaggggtggtttggggatgattcaagcacattacatttattgtgcactttatttctatcattattacattgtaatatataatgacataataatacaactcatcataatgtagaatcagtgggagccctgaacttgttttcctgcagctagatggtcccatctgaggttataggagacagtgacagatcatcagatattagatcctcacaaggagtgttcaacctagatccctcatatgcgcagttcacaatagggtgcacgctcctatgagaatctaatgctgacgatgatttcacaggggacagagctcaggttgtaatgtgagtcatggtgagtggctgtaaatacagttgaagctttgcttgctcacccacagctcacctcctactgtgtggcccggttggggacccttgtcttatattatttataagttaaaggaattggaatagaacttaagatcagaaaatattagaggtaaatttttgttgacttcatgacaaaaatcagttggacttagccttaaaaatgcatttttatgactaacatagtcaatgtatagtttcaaaggcacatgacctgttattcctcaataaggtaaatatatttggttatatgcatttcccaatacaaaaaaatgtgttcagtttgagttttcttttcaacagtcgataaagggcaacataaaatcattagaggaataactactctactactcaatattttaactcaacatacatcagtaataaagttacagaagatttatatccaagtttcatacatgtatcaatgattaaataattaggttattaactcatcgagacctttatgaactaggttattaactcattgagacctttatgaactaagaattatatccaagtttcatatatgtatgaatagttaaataagtaagttattaactcattgagatctttattaactcatttagactttatggactaggaccagcagtgtatcgtctactgactagaagcagaaaggagatgagataacccttggagttaagttccagttttgtattcctttaggttcatatttgataatcttttctgatctggtacatttcaatttatttcgtggcttttatcaagcattttggctgtgttttctcagtgtttcagagtcctatttcataatgtaaatgtagcattttgatagtccatgttagctcatccatataaaatgctatttgcatcgtctcgtaaataacattattttaaaatatttagtgtaaagaagaacactttttaatgttaacattttacattacttactggcctacaaacaggatttatgctgaaacaattgactaattgcattcttggcacaacatgctgccagtaattcaatcatagagttgtgaagcctctttttttctttttattttctaccttgaaactgtaataaagctatagtctatgataaaaactgggggagaattataattcttgttgtaaaagtacagcaattagtccagatgctaggataaatccctagctaagtaggtccattcctaactgtgcttttcagaactgatagattaatctcgaaatacagtttgggttttattaaatcctcaagttcaatcccacattctgcagtaataattcttcatgtttattattttctctactcctcttaaacacttaaactgtctgtatgcctgttagctagataataaaaacaaaacaggcaaaaacacccactaggtcttgtttgtgcgtgtttttcatctatcaaaatgaaagtaagttaaccatctcaattccttgaaattttttgtttctagaaaaagtgaaacatttgatttgatactagcacttattttcagtaattctccaaccacctacaatctgccataatttatctgtccctgactaccctcatgtactcatttccctccttatactgcttagatcttgtgccttatattatgatctatcccatttataagctttcactatcttcccctctttcttcttggcaaaattaaaatacttgttcagtccagctcctcagcactagaatctgtgaacaagcctggagaaaaacattcagattgtatggtctcttctaaatttaataccaacaggaatgactgagcctttatcactgttcaggatctccagcccatttacattcctactgccctaagtgacaatttcattccttcacctcttcctcaaaaccccaacatcttcttccccatcctgtgtcttatctgaaaatcttgcttcccatttcacagcaaaactaaagtctatcagaaatgaatatccataagctcttggctcccaccacatttaccatggactaacatctgaatccctttaatctactttccctgctgatgctatgcacaaagtattttatcgtatgtaagccaatcttgctcttgcgattagaccacatttcatttggtcacctcaagaacatttatctagcaattattctctttgtcattctctatatttccttaaaataagacctttccattagcatctagtattttctccttttgacctaattatttgtttagtttgaatctatcttatattcctcaatatggtatagttctttgagtacaagaaacttctactttgcttgatcagcaagtttttgctggactataacacatgacatggtttattagcatttaaatttaacctcatatgaagttttttatattatctaaataaaaatgtccaataagtaaaaaaggagacattccagaagatcagtaaattgttgttgaataaatgaagagatagctcacaacaacttgaaatgaacttgattgtcaaaagtgagtatcagctcaaattaaaaagaaatgctacaatagaatttcatttccctgtagcacttagtcaaaagaaaaagagatattatttttgtaatcccagaggacacaaaacttaagtattgaaatggtttcacatatgcagcagtcattgaatctacgcatgtgcacacattcatacacacgttttcatttttgccaatagcccagaaagaatattggtgagaagagaatttttgtaatttttaaagtgagtcttgcagattctgacctatctccaaacttaagctgcatcacaaaagagtgcatagataaatctcttttctatttttgagcttattaatgtttgctgcctcatgttcccaaactgagcacacacaaaaccacaaaagcaggatgcattggggagggctgttaaaaccagctggtcaggaaatccatttggggtcagtaaactggctgctaatgacaccaaccaacaggaaaaaggtagagagtacaagagcaggacgtgcatttaggagtaaaatcaatactcgtatttgattggtgtgatactttttaggtaattgtgcaaagaaatcccaatatgtagtctcaaagtgccaacttcaatcttggtttaaaatacttagagaaatattaataggttatgtgagaagactactatatggaccaaaccttgtcttgacaatcttcatgtttatttaaaacaaacaaaaaccagctaacaattgcagaatttgttagccttttatctggttttactacgtttctcaaacacattggtcttatcaaaaataattttgtgacttttatatgcttttggcttttagtattttctggaagctcaatttttgtttcttttacaagcacaaagatgcttatgtaaagtttcaataagagaaaattctaccataaactaattgttttgtgagcacattatttaaccaccatgggactcagtttccttatctctactggtttgccaaatgtctgtaaaaatacagcaagttaatgctaacatctgtccagaaagtaagtctaacttctagttattaacatgaaattatttttctatcatcaactctttcaattatctaaataaatattatttaactctttgttgaccaagtgaataaatgaacaaattaactgtaaaattagaatcagaaaggcatataggaattttcttgtttacactattcattataatgagaattatactgccgtcttagtggaatagcttgcaaatatttagtttttgctttaataataaggaaagtttaaaatgttgaaaattctaataaccttagaaaaccaagggaaaattaatagttgtcatgcatcacagcaagtgatgtcagttatatcttaatttttccaatatgtgttgtgctcctatatatttataataaaaaatttacttcttatttctaaataatttcaaacttatggaaaaatagcaaacatagtaaaaaggactacaacaagattataattgtattaatccattctcatgctgttaaaaaagtcatacccaagacttggtaacttataaagaaaagagatttaattggctcacagctcaggatggctggggaggccttcaggaaaattacaatcatggcagaaggggaagcaaacacgtccttcttcacatggtggcagaaaggagaagaatgagagaccagcaaagggggaagccccttataaaaccatcagatctcataagaactaactcactatcatgagaacaggatggggaaaccggcccatgattaaattacctccatctggtccctctcaggacacgtggggattatgggaactacaattcaagatgagatttggcggggacacagccaaaccatatcaatagtaatacttacttcatatggttttagtgagaatcaagttactcatgtatgtaaagcattaagaactttagaaacaaatgagttgggagcaaaagtgcttataactaaaaaaattattcattattattaagtcttgattttggcacttgaacaacaagagtgcctatcttataggactattggatgcataaaacttagaaacccatggtttttccagtctaagctaatgacagcctgtgctatatatataataaaacttactgaaagaaatctaatcccagtgcctaaaattatttgagtaacactacaataaaataaaaaatccctacatatagttttttaaaacctagagtcaacaattatatctagtctttacattgtaggcttccctaagtttcacattgatagtgatcaatgtgagggtaagtttagttgatctctgctaaaatgaatgcagcaaattatttgatatttggaaaacatttactggtggaagaaaatgcagttaccttgtcattatatagaataagctatataataaaattttggtaaagagaacaaaatctatttgttaatctcacacttttcaaactggagtctttgtgcctcagggtgagggccaggcagggaagttgcaggtacaatgtgccaggagtagtcaaagccacaggagaaacatggcaagccttcctgaaatccaaattttaggagaagatgaagtgttatggggaaatgagatttcatattaaaacaaacatatcctaattatatacatatttaattccatgtatatggaattaaaatacacattttttcagaattttaaagtatgaaaactagttaaagcctatttgagtcatgttcatagaaatctaaggactatatattcactctcctctggtgttaggagtacatcaatcatcaattagtttacttgtgtaacaattatttatttaaggctaactatatgccagacactgtactatgctctcaatgcaaaagtgagcaatacagatatggtccctgcccttatggggcttacagtcaagtagtaggatgctttttttttttttttttaattaagctaacttaattctcctaacaactttatgaggtgaattctattagttattttattcatgttgtgttacttaggacataacagtgctttaaatacaacaagcaggattttcaaacacaaaataatgtgcagggatagtctaatttagatgagattttatgaggatgatgaggtatggattggaggaaagcgaggtttaatgcagagactatataaggggcagtttctagtgtaacacatggtgatggaaatagaattagagtgaagtggttcaatttgaaaatatacactggaggtacaaataggccttggatatggggaaatcacggattggatatggggaaatcacatgaggaaaacaaaaataacttcccaacttgaacaaatgggtatttgaacaatagattggaggagggcgatttaaggttaaagagaaatcagtttggggcatactaattttaagatatttctaagacatccaattagaggtgttcagttgtatatataaatatgtatacttatacagttgtatacaatacagtatgttaggacctttgggaaaaatatcttagctagagataaaatcttggcatcttgagtaacacagcattaaattaatatacgctagcttagattatttaaacttgtgtcctttattttatccagtgccccttttctaacatatttaaagctttggaaataaacatttggcattagtgaatataatttcatgcaacaaacatgtaggggatacagagctaagtccttcaggatttcagccattaagtagcacaactttgaggatagataaaaatgtgataaaacataatagatgacaagtatatcataattatgatacaaataaactgctgcaaaggtagaatacaatttataaatgtcagcctggatagtgattgagtatgggaagtaaaacaagaaaagataaagaatagacaaagagggacagagcagtaacaaaggaaagaagtccaggggcctacaaaatagctaaaatatattttccagaggcaagagatgttaggagtcatgcatagttggcagtgctgcatcagttgtcagactagtggaggacaatcataaagtcagagacactgtgctggggtaggctttaaggaaggaaaagtaggcccatgggctgggcaatgaagtttatttctatcgtaattatatgtcctgcatgtaggaatcatttctaattcctgtgggtcacttaatgaatctcatcaattttacaggtctcaagaaagcaccaacctgtgagccaaaggagccatcttaatgtctttaggtcattaattttatacatagcatgttctttactacaaggctactttgagagtcactgtgtcactgttgggcttctggcataaataaagttaacataatatactcaataaactctttcactccttagctaactccaacatcatccagacactgatgctcatccaagttgccatgtagatttataagaagaatcttgttaagataaaataactaaacataaataatactttaaattttattgccatgaaatggccaaaggtaggaatgtagcagtaaccccggaagagcagtccttagttctaactctttttcttgggggagtgacatgtaaaagcctcttcaaccagaagcacagtgcccttgagcagcaggggagcatatcacttatatctaaaagggaatattttgtcaatgaaagtacatgctaaaatatattatattgatggtcgtaaaaataatgttattagaaattgttttaaacaaacatttttgaaaatgaaaataaaaatagttaatattttataacttatatgaattgcctaattttttttaatgagaagaataattactgtggtacatctcatgtatattaatctgctgaaatttctgatatttttctgaagtcagctttttaatatgaatttattattcttaagttttaatgaaacttctgggaatcttcaaaattgcttgttatggttaataaatttgaaatattgacacatttaatatatataacaatatttttatttgaaaaatgttctcaaaaggggcttaggtatctgctaagaacaaattttgctaaattgaaaatattctttttattaattgaaaatatttttaattctaatgtatttttgcattgtaatgtaaaagtatttgagtccaaggtttttcacagacactgagctttcccccccttcatttagtgttccattatccaagaaataacttcataataccacacttgccaaatagattgcctaaatttatggcttttttaatggtttgccaaatttagatgcagaaaaattataggcctttaaaatcatatttcaatcctgcacagaatataaatatttggaaattagaaattacaccaggtgccacatagaatataaatagatcatacaattcagaactttatctaaagactgttctcacaaattaagatattctaaagtatgattatggaatctcaaaatcaaatcttatcctgtctttgagaatgcattatttcatttgatttgttcagttaatttcttgctttagtccatttcagcacattcttgtgggcttcaagttgcaagttttgttaataataatagctattccttaaaagtttcaagagctgaatactgggatgctccatttgtgaaatactatgattaaacatttccaagtaaatttgcaaaaaaaaagcacccaaagtttagaggacttatgtataaaaagttatttttcaatagtaagtatgagaaatgccaagaaaatatgccgattgctatgttaaagtattttcatttttttaattcaatatcagctttgtctccaaaattttgtaataaagtgattctaattataaaaatatttataaatcttgtcacctttatcttctattttgatttgtagaatattgcaatttatttggacccaatgtgaattatatttgcaccacaacaaattcagagtccatttctactccatacatttcttattgtgataagaatactgtttttagtgtaattatgttcagcaaaaattttttgtgtgttatcactgaaaaaataagtaacctatcttcaatgtcaacattttcaactaaaattgttatactttttacactattgtcagattttaaactttgatagaatgaccttccatagctttattttgagtcattgaattggattaaaaaatcaaactagtattgaaatatattaattttatgtttgaggcatatgataaaatgaaataaagtagccataacttaaatgtttataaaattattttctgctagtagaggcagcacattaacaactgttgcttaacttatggtacatatatttaagaagttgggagttgaatagaatgaacagcatgctttctgtcattcttaggttgttttgttctgactgacatgacctaaaagtaagtacatgtggaagaaggtcattatggaacttactggtaatttatttgcagaattaaatgaaaataatagtgataaataagggaatgcatattgattgtaatccaatctcttatgtcttcctgtatccatgcttttcggtagtgccctctcatgctgacacttggttatgtcacttgcttagaccagtggggttgtagcaatgttgatgtaagcaaggtcttgaaaaaatcttcacgtgattaatacggccattatggaaaacagtatgcagttcctcaaaaaactaaaactacaacttccatatgctccagcaatcctacttctgggtataaatccaaaggaaatgaaatcagtatgtcaaagagatagctgcactcccatattcattgcagcattattcacaatagccaagaaaagaaatcaatctaagtgttcatcagaagatgaatgaataaataaaatatggcatatatacacaataaggtaataatcagactttaaaaagaagaaaaccctgttatgtgtgacaacatggataaacctggaggactttatgttaaggaaaataaaccagacacggaaagacaaatactgtatgacctcagttatacgagggggctttaaaaagttatggaaagtgtgtattatgaaaaagttatgcatggatttcatgttttttgcaccagaataaacttgtagtaccttgttataacagctatgaacaggatctaatttgaggcactaaaaagaataagacatcagtttcaaaagagcacctatcagaaccacataaattctgcaaaaattgaagcaagaacaaacaccaaatttatagtaaaacttaggtagaaaaatgaagacatcattgatgctttacaaagttatggggatgatgctccaaataaatcaggagtttacaaatggacaatgaagcaatgttgaagatgaagcccacagaggcagaccatccacatcaattttcaaggaaaaaaatttatcttatttattccctaattgaagaggactgacaataacagaaacaaaagccaacaccataaacatctcaattgtgtcagcttacacaattctgagtgaaaaattaaagttgagcaaactttccactcaatgggtgccaaaaatgttgcttccagaacagttgcagatgaaagagagcagagctttcaatggaaatcttaaacaagtgggatcaagaccctgaagcatttcttcaaagaattgtaacaggagatgaaacatggctttaccaatatgatcctgaagacaaagcacagtcacagcaatggctaccaagaggtggaagtggtccagttaaagcaaaagtgaactggtcaaaagcaaatgtcatggcaacagtttttggggatactcaaggaattttgcttgttgactttctggagagccaaaatataatactatctgcttattatgagagtgttttgagatagttagccaaagcattagcagataaatgcctgggaaacttcaccagaaagtctttttctaccatgacaatgctcctgctcattcctctctgcaaacaggggcaattttaggcatccaccttacagtcctcacttggctctatctgactttttttattttctaatcttagaaaatgtttaaagccacccatttttctcagttaataatgcccctcccaaaaaaaagactgtattaacatgattaaattcccaaggccctgagttctttagggatgaactaaatggcaggattgttgcttacaaaagtgtcttgaacttgatggagcttatgttgagatataaagtttagagaagtagagaatagaatggtggttaccagtggctggaggccaaaagcgggggagactggagagatgtttgtcaaagcacacaaaattagacagtttgacaggagaaataagttcaagagatctattgtacaacataatgactagagttcataagaatatattgtatacttacaaattacttagggagatttttgttctcaacccaaaaaaatctgagtatgagaggtaatatatatgttaattagcttgaattagcagttctgcaatgtatacatatatcaaaatatgatggtttataccacaaatatatacaatttttgtcaattaaaaatatattttgtaatcctcacaaaaatgaaaataaacaaaattaatttagaagaacagtcatttgagctaaatgaaaagttatgattcagagtaatctgcaaatgtatcttttgtgtctccccaaaattcatatattgaaacttaatctccaatgtgatattgttagaaagtggcatcttagggaggtgattaggtcatgaggatttgccctcatgaatgatattagtgcccttataaaagagaccccaaagagctagttatcccctctgccatgtaagaacacaacaagatggtgccttctatgaggaacaagccctcaccagtcaccaaatctggctgtttcttgatcttgtacttcccagactcaagaattgtgagaaatagatgtctgctgtttataagctgcccattctcagatgttttgttatagcagcccaaatagactaagacatagctgcatgtgttaaatcatcgtatgtaggcacagccttcttacaataattactaactgaaatagatgctgatggtcctttaggagaactgtttctggttttcatttggttgtgaccaagaatatataagaaatagaaatttagtatatagtactttaattaaatatgtagttttaattttatttatttctgtcggaagggttttattgcaaagttagaaaatatttactaaacactaaaaaccaaataattattggtttataccacacagtaaatggcaaaatcagtgtagcaaggctgtctaactacaccctatatgccttatagcagggctggccagtctaatttcccaagttttcagcttaccctatcaattggcagcctggcagctttgtgaattttgtagactaaaacatcgactagataaatatatgaatggtccattgaatggtcagtaaaggagcagaatgggcatgagacaatttgtcacaaagatcaaagaagagaaactgagacagtctgtgtgcattccatcacctaccattttactgagatgaagttaatatttctccaagaatcttcagtttcttctccaatgtcaccatcctgatttccagaaattgcctcgtgtctagagcagccattttctttccattcatctattttctgtggtgatgagctgctgagctggtcccatgtttttgattaaggtgaataatctttgtgtggtcttccccgtctttagtttgctgatgggttgtaaagtactagttcagtttctagtgttttaagaagttcctgcttttgatacgtctttgagggactggctgtgagacccacttgctgccttgcttcaatttagtgtctaccaagcacaaagtggttttgaatgaaaactctataattaggcttggtcatctaggttagttggttacataggtgaaatggcttttcttgatgttgagctcgtagtctagccatgtttatccataattggacttgccttttgcctagggaagtatccaagtgaactccagagcatattgctgtatttagccatgacttactgctttccaaacactgtattctccagaaggtacactttgagatggtgatttcatgcaggagatttattaggaagtattttgggggccaacacctgtggaaaaagaaaatagagacaagttcagctgcaatacaatctcaatagaagcctctgctgaccctattgggagttctgaagaggtaatgagccttaccagctgtcctgaattggggtgaagtggccaggcttttataaccacatgttcatcagtcattgaatgaaggctacctatgaagagtgtgtaggctaggttaggcagcttttgtcagctgaggtcatcctcaaagggggctaagagctgagaggctgtctgctggcagcacacctagcatctgacataataagccctttattcctgacagggaatcttcttgcatcacagcacctacaccattgcccttggatacattaatagagttctcctattattggctttttttttttttttttttttgtgatggagtcttgctctgtcacccaggctggaatgcagtggctcactgcaacctctgcctgccggattccagcaattctcctgcctcagcctctgagtagctgggattacaggtgcgtgctaccacgcctggctaatttttgtatttttagtagagacggtgtttcaccatgttggccaggctgatctcaaactcctgacctcgtgatccgcctcggcctcccaaagtgctgggattacaggcgtgagccacatcgcccggccctattggctttttattcccaacatgctgagaacaaatttgcagaaaatcgaaggcaaaagtgcgtagggccctcaaaaatcactgtgcatctctgaaactttgataagcctacttttatactttgttatatgatataatgaatatctttattacttaagttattattattcagaattctgttacttgtaattgaaagtattctcaacaaatataaccaaacttgtacagccaaaccattcaatgacaaaataattaaccaaaaaaatcaactgttgacttttgatagaaaaactaaaaaaagcctctctgaggagataatatttgggctgaaatctgaatcacaaatggggttagccaagtgaggatgcaagaagagcattcctgttagggggaacaattgcagaatcctaaggcagaagtgaatttggcaggttcaaaaacatgattcttattaaagaatttggtttgccaggctatgatttaagatgtttaagatgctccagtaatgcttagggatttcccccacaaatatttaatatgattacaaacattttaaatgtaaagggaaagaggaacaagaaaaattgtcaaataaatgattatgacttaggaagaagaacatttgtgtaagaggttatctgcaattgtcagaagaaaaaaatacctgataaatatattgagaacaagatttgccttcagagatgtgtgtgtgtgtgtgtgtgtgtgtgtgtgtgtgtgtatgtgtatttatataaatacatacaaggaggtaaacatagctttatagcatcatcaagctgaattaaatgacaggagcataacagcagaaagctctatcactcttttaggaataaacctggtagaagtggaggtgtgttagtactgtatgccaagaagttgctggaaaatcttcagcagtgtggctggagaattgttggaaaaatcttcataaagacctatctccatttttacctgcataaagatagcagaaagaaaaaaatactgaaagaaaaaaagtaagattccacaggccaagattcttggaaaaatagatgactcaagagtaatagaaaactttcagacatgaatctgtgactgtaccgcatcaatgatgccaatttgcagatgtatttgctaaacttctgccagtaatcactgaggaattacagaaaatgggaaagattgtagtgtcagccaaggttcatggcagaagacagaagcattttaagcagcagagattaaatgctgtaaatgggtgcctgcagttacaggaaggcctggagaagtgggctgtactctgggctaccttgaatgactcccagacacccaagagctgaatcaccagggagctcccacctctgagagtatcctagaaccatcagatttccagaacatacaatcaaagctgagataggaaatcatagagctggaactatgcacttactgttgccatggctactctattatgctgtgaacgggggagtggaacctggagttcattggggactctgcttccactcctcctcttaaccaggaatctagagaatgacatgaattattgctttggaagaaaacctcacatctccacaagaccttgcttcccaaataagacatgtcagaagatgctgataatcctcacttctgcattacaaatcgctcataggtgcatctgcaggatcttacttggatccagagtgctagctgcaaaagcttctgggaattgtacacttaactctgaagttttatctttaatataggaaggtatgacatagaagagtcagatggaagttcagtaaaccaaaccacagtatccacacaattcaagacagccaaaagttcttatttctttagaggaagggatagcttataagagacacctcctgaactcaacactggtccttgtattggttagaaaagataccctgtgaaccattaagacagggtgtagtgatcactgggaatagggggtttgttaaaaacaaatcatacagatagtttattaaagtggtaagccagagaactgtatggctacagcgtatatatgtatgtatgcgtgtatttattatttttattgatatggggtggtctcactatgttgcccatgctggtcttgaactctcgggctcaagcaatcctcctgcctcagctttctgggtagctgggacaataggcacatgccactgtgcccagcttataatgtatttaaagtttaacaaagctttttgtctttttggaagatgtattttatgatgtcatgggatatacttgaaaaatgtggtcatgatggtggtacagttgaatgtatttgtaattagcagaaagactaaagaactactgattagcagatatgtgtccaattgttgcctatgctgtaggaattaatgctttatcctgtcctacataatgaatctgggaagaacattgattttaaaaatagtaatagccatcatttactcagtgctcactctaggtgaggcactatttatacattattaactcttttactccttacagcaagcttgtcaagttgttattctcttcattttaagtatgaggaaactgatgtcagaaagtgtaaatgacttgcccacatttagtaagcagcagggctgacattcatacctaaaattgctttgaggaggaagtaccagacagagggagaatgccacaacgtttccaggagaactgtctagctttttgcctgccaagaaaccccacagggtgggattttctcagttattccacatgagatagggggatggcccactgtcttgcatgatctggtcaatatctcagggactcaaacttacactgacaatcctcactaccatctcacatataaaaccagatgcccgttttttgaaattatgaaagatgtaacagtcaggctgaccaaatatagacaatattcttatacacatataaagtcttgattagtataatgttgaataagtcttgattagtataatgttggctgtagaggatcgaatcagcccaaggagactctgatcagaatgctaactggctgtagtttctgacaatcacaatatgaatgtgtccatctggttggctgacaggatctctagacctacatggaaaggtactttcttatttggccaagaagtgccagagtttgcctctccaactcccttatatgccttcatgactgattgccattctttcttttgatattttaataatttcagctaagttaattttggcttaagatttagttcttgtctttgaggtgatggatcaattttctgccaatacaatgacttaactttagacagtaagtttaattcctgtgtttccaaatccactgttgcccttgtatgttacctataagaaacatgcccacttggctctttatctgtgctgccattggtaggtgaaaaagaacaaacacaagcacagaagcaccagtgctgacatattagtgtaagagcagcacaagatttttaagagacagtattttaaattaacacaggctcactgtgagtcaatagggtgggatggagggagaggagccaagatggctgattagaagcagctccaggccgggcctggtggctcatgcctgtaatcccagcactttgggaggccaagatgggcggattacttgaggtcaggagtttgagaccagcctgaccaacatggagaaaccccgtctctactaaaaatacaaaataagctgggcgtggtggcgcatgactgtaatcccagctactcaggaggctgaggcaggagaatcacttgaacccaggggtcggaggttgcggtgagccaagatcgtgccattggactccattctaggcaacaagagcaaaactgtccaaaaaaatagaagcagttccagtcagcagctcccactgagaagaatgaaaacagtgagtgaatcctgctccatcaactgacgtatccaggttctctcactgggactgaataggcagttggtatgacccatgcagagtgaggaaaagcagggtggagcaatgatccgggagctgcatgggataaggggaactcccacacccagccaagagaggtggtgagtgactgcgctgccccgcctgggaaaccatgctttttccatggatctgtgcatcctgtggatcagaagatcccctcatgggcccacatcaccaaggcctttggttccaggcacagagctgtgccacctgcttgggttgcaaccagtagcagcaggctggacaatgcctaatacaaccgagtgcctggggaaggggtggccagtcaccatcactgcaactccagttggccattttacgctgctggtgtcagggagactgggtggtttgaactgagaggaatttcccatagcagcacatcacagtggctgtggcagatcgtggccagactgcttctttaggtggaacctggatccatccctcctcactgagcagggcctccctgcagaaattgtagcatctccagccaggggttttcagacagaactctgatatccctgggaaggagcccctgaggggaggagcggccacagtctcacagttgggggcacctagtctttcctgcctgctggcagtccagatgagggggattctccccagcacagcccaacctgctcagccaaggggtagtcagactggttctttaaacagttccctgatcctgtgcctcctgactgagtgagacctcccaacaggggttgccagacacctcctacaggagtgttctggccagcatcagctcagtgcccctctggtatggagcttccagaggaaggagcaggcagccatctttgctgtttggcagcctccactggtgatacctccaagtgcaggagggacccaggtgaactgggtctggagtggtcccccagtaaaccacagcagccctatggaagttgggccatactgttaaacaaaagaccccacaaaaaccccgtccaaaggtcagcagcctcaaagatcaaaggtagaaaaacccatgaagatttgaaagaatcaatgcaaatatgctgaaaactcaaaaagccagagtccctcttctcctccaaatgattgcagcacctctccagtgggggcacagaactggggtgagactgcaatggatgaattgacagaagtagtcttcaaaaggtgggtaataacgaactttgctgagctaaaggaatatgttctaacccaatgcaaagaagctaagaaccatgataaaacattacaggagctgttaactagaataaccagtttcgagaggaacataaatgacctgatggagctgaaaaacacaaaacaagagcttcacaatttaaccacaagtatcaatagccaaatagaccaagtagaggaaaggatctcagagcctgaagactatcttgctgaaataagacaggcaggcaaggttagagaaaaaagaatgaaaaggaatgaacaaaacttctgagaactatgggattatgtaaaaagaccgaacatatgactgattggagcatctgaaagagatgaggagaatggaagcaagttggaaaacatacttcaaaatatcatccaggagaacatctccaacctagtaagacagaccaacattcaaattcaggaaatccaaagaaccccggtgagatactctatgagaagatcaactccaagacacacaatcaaattctccaaggtcaaaatgaaggaaaaaatgttaagagcagccaaagagaaaggccaggtcacctacaaagggacacccatcagactaacaacagacctctcagcagaaaccctacaagtctgaagagattggaggccaatatgcaacattcttaaagaaaagagtttccaacccagaatttcatatctggccacactaatcttcataaatgaaggagaaataaaatccttttcagacaagcaaatgctgagggaatttgtcaccaccagggctgccttagaagagcccctgaaggaagcactaaatatgaaaaggaaaaaccattaccagccactacaaaaacacgctggagtacagagaccaatgacactatgaagcaactatattaacaagcctgcaaaataaccagccagcatcatgatgacaggatcaaattcacacataacaatattgactttaaatgtaaatgggctaaataccctaattaaaagacacagaatggcaagctggataaaaagacaagacccaacagtgtgctatattcaagaggccaatctctgtgcacagacacacataggctcaaaataaagggatagaggaaaatttatcaagtaaatggaaagcagaaaaaggcaggggttgcaatcctggttactgaaaaacagactttaaaaccaacaaagataaaaaaaaaaagacaaagaaggacattacataattgtaagggttcaattcaacaagaagaggtaactctcctaaatatatatgcacccaatacaggagcacacagtttcataaaagaagttcttggagactttcaaagagacttagactcccacacagtaatagtggaaactttaacaccccactgtcaatattaggcagatcatcgagacaaaaaattaacaaagatattcagggcttgaactcagctctggatcaagtggacctgatagatatctacagaactttccaccccaaaacaacagaatatacattcttctcagtgccactggcacttaccctaaaattaataatataattacaagtaaaacactcctcaccaaatgcaaaataagtgaaatcataacaaacagtctttcagactacagtgcaatcaaagtagaactcaagattaagaaactcactcaaaaccacacaactacgagaaaggtgaacaacatgctcctgaatgactcctgggtaaataatgaaattaaggcagaaatcaagcagttctttgaaaccaatgagaacaaagagacaacataccagaacctctgggatgcagctaaagcagtgtcaggagggaaatttatagctctaagtgcccactttgaaaagctagaaagatctcaaattgataccctaacatcacaactaaaataactagaaaactaagagaaaacaaaccccaaagctagcagaagacaagaaataaccaagctcagagcagaactgaaggagatagagacacgaaaaatccttcacaaaaatcaatgaatcaggagctggttttttttttttggaaaagttaataaaatagaccactaactagattaataatgaagaaaagagaataatcaaatagacacaataaaaaatgataaaggggttatcaccccacagaactacaaactgccatcagagaatactataaacaactctacacaaataaactagaaaatctagaagaaacagataaactcctggacatatatgccctcctcaaactgaaccaggaagaagctgaatccctgaatagaccaataacgagttctgaaattgagcagtaataaatagcctaccaaccaaaaaaagccaagatggatttacagctgaattctaccagaggggcaaagaggagctggtactatttcttctgaaactagtccaaacaattgaaaaggagggactcttcctaactcattttatgaggccagcattatcctgataccaaaacctggcagagatataacaaaaaaaagaaaacttcaggccaatatccctgattagcattgatgcaaaaatcctcaataagatactggcaaactgaatccagcagcacataaaaaagcttatccaccataatcaagtttgcttcatccccaggatgcaaggctggtttaacatacgcaaatcaataaatgaagttcatcacatcaaacagaactaaagacaaaaaacacatgattatttcaatagatgcagaaaagtccttcaataaaatttagcatcatttcatgttaaaactctcaataaactaggtattgaaggaacatacctcaaaatattaacagccatttacagcaaacccacagccactatcatactgaatgggcaaaagctggaagcactccccctgaaaactgacacaagacaaggatgccctctctcttcatgcctattaaacatagtaatggaaattctgaccagaacatcgggcaagagaaagaaatatagaggatattcaaataagaagagaggaaatcaaattgtctttgtttgcaggtggcatgatcctatatctagaaaacaccataatctcagcccaaaagctccttaagctgctaagtgactttagcaagctttcaggatacaaatttaatctgaaaaagtcacatgcatttctatacaccaatagataagcagagagccaaatcatgaatgaactcccattcacaattgctacaaagagaataaaatacctaggaatacagctaacaagggacataaaggacttctttaaagagaactacaaaccactgctcaaggaaatcaggacacaaacaaatgaaaaaacattccgtgctcatggataggaagaacaaatattgtgaaaatggacatactgcccaaagtaatttatagattcaatgcaattcccattaaactaccattgacattcttcacagaattagaaaaaactatttaaaaaatcatatggaaccaaaaaagagcccaatagccaagacaatcctaagcaaaaagaagaaagctggagacatcatactacctgacttcaaactatactacaaggctgcaataaccaaaacagcatggtaatgttacaaaaaaatgaaaaagatacatagaccaatggaacagaatagagaactcagaaataagactgcacgtttacaaccatctgatctttgacaaatctgacaaaaacaagcaatggggaaagcattccctatttaataaatggtgctgggaaaactgaccagccatatgcagaaaattgaaactggacctcttccttacaccttatacaaaaattaactcaagatggattaaagaagtaaatgtaaaacccaaaactataaaaatcctagaagaaaatctaggcaatactattcaggacataggcatgggcaaaaatttcctgatgaaaatggcaaaagcaattgcaacaaaagcaaaaaaggacaaatgggatctaattaaactaaagagcttctggacagcaaaagaaactgtcatcagactgaacagacaacctacagaatgcgagaaaacttttgtaatctatccatctggcaaaggtctaatatccagagtctacaagaaatttaaacaaatttacaagaaaaaaaccaacctcatataaagggggcagaggacatgaacagttacttctcaaaagaagacatttatgcagccaacaaacatgaaaaaaagctcaacattactggttatcagagaaatgcaaatcaaaaccataatgagataccatcttatgtcattcacaatggtgataattaaaaagtcaagaagaaacagatgctggcaaggctgcggatagggatgcttttacactgttggtgggaatgtaaattagttcaaccattgtagaagacagtatggcattcctcaaagacctagaaccagaaatatcatttgacccagcaattccattaccgggtatatacccaaaggaatataaatcattctgttgtaaagatacttgcatgcatatgtccattgcagcgctatgcacgatagcaaagacatggaatcaacccaaatgcccatcaatgatagactggataaagaaaatgtggtacatatgcatcatgaaatactatgcagtcataaaaaggaatgacatcttgtcctttgcagggacatggatggaactggaagccattattcttaacaaactaatgcaggaacagaaaaccaaacactgcatgttctcacttataagtgggagctgaacaatgagaagacatggacacagggacgggaaccagacacattggggcccgttggggccaggaagcagaggagggagagcatcaggaaaaatagctaatgcatgctgggcttaatacttaggtgatgggttgatagatgcagcaaaccaccatgtcccacatttaccaatgtaacaaacctgcacattctgcacatgtacccaggaactttaaataaaataaatttttttaaaaagtgaaaaagaatagtgtggaatgtcattattaaagagttccaggacagacttagctgtataaacaatgtcagaacaggattgttgaatgaatgagcaaaggaatgaatgagagagttactagctctaccctaatcttcagtaacactctatacccagagtagcaatgtttatttagcacaaggtccacattttcagagcatattgacacactggagtttattcagaggaaactgaccagatagtaacgggacttgaaaccacatctgacaagtgatggtaggggactggtaatatttaatttaagaaagtaaagacttaggggaaaaatgctaaaagctaagagttaagagtgttgactctaggccacgcattgtgtgcagccttttaatagatttcatatattatggttaataatggaaaggaaacattttattttgagttgccctggaaggcaggactaacagtcgtcagtggaaactgcagaaagataactctgtttattagaatgatggcatttctattctcaaagctgccgaacaatagaaagagctgcttagatataatgatttccatgtttttggaggtgggcaaacagagactggtgaaacttttcatggacatattttagagaggaatgagtattaaatgaaagtatggaccaggtgaactctaagacttttttcaaccttattctgtgaatctatcattttcttacagtacagaaattccattttttgcccctagttctgtggcatgaggcttcaatggtcaatgttacttctaatttagtagatcagttgtagtggattctggttttgcatttcctcctgacaactaagacaaaacccagcaggactcaaagtttcagggatgggtcacatattttgtgagtgcatcattaggtataatggcaaaaagagcctctctcactttctcatttgatctctaaactcatgtactctgcatatgagagaaatagcaccaaatatttagatagctttttcaaagcattgtaaattttcaatctcggtgtgaaagcttcacatgtgaatagcatttatttttgtctttgtatttaaatgcagttatttatgtttctaaaactctctgattgcatttcttattttgagctttgttattgttaatgagagtacactttgatcatcagcccaccagtgcttttatggcaattaacatcacatcttaaaaattggttcttagttgggtgacatagtatgtggctgtagtcacagctactaaagagactgaggcaggaagataccttgagctcaggagttcaagactagcctggggaacatagcaagactctgtttctaaaaaacaataacaaacaaaacacctggttcttgtgaatgggtatagaaaatgttcatttaaaacaaacaaagaacaatgaaattttatagctataaaaattaaatatcatatattaacagatgagaaattcaagctcagagagattaaatgacttgccatagtcacatggctagtgggaaatttgaatgcctgtcttacttctttattccacccactcactgaggcaattatatgctatattcttggcaagatctttttcttctcctttgccctcttctactccttccccccttctcctgtttctccttcttcccttcctccaactcttcttcatcctcctagcatgtagaatattcttatgccagtcactcatatctttacttaaagcctgattggcatgtgaccagagtagacagtatctaagattccgaaatagcattttctttaccagtatccttaatcaagtaggcaagagttctaaggaatcttttgttcttaattctgagttgctcttggatctctacagtgccgcgtatgatgctgtccttgacagaaatgtggccattaagaagctcagcagaccctttcagaaccaaacacatgccaagagagcgtaccgggagctggtcctcatgaagtgtgtgaaccataaaaacgtgagttttgttatttttaaacttctggcagtgggagtttgtaagattggaaaaagaaaatgtgtctgtacttgagtaagaaaggctttctttgctttgcaattcctgcctcttaagattgtttatcctgccaatatgctacattcgatttcattgtcctcatggtagctttctgcttaaaaatcacctaaaaaccatatgatgtggaagtgatgaattttataaatatttccctagttagaaaatttaccatatttggttatcttgctccaaattgagagcttcaagaaagaaacaagacaagcaaagccaaaagccagaaaaaaaaaacctacaaagcaccatgctacatttctttataatttagatttaatttagatttataatttagatttaattgccaacggttgagttttattcatgttatctcctttttatttcagctgtagcctggtggtggcctctaattgttcagtgaattcactgtgtgttggcatcttatttttttcaggggtgggcaagtatgtgagtacatatttgcaaaccacttgagaataggatcaagagctttttctcatcggaactcagctgggtagaccagtaaaggactttcttcatttcagaatctaagctccttcaatcacaggccaagacctctagaattctttctgtgctccacttcttcttaataaagataaataggagataattcattattttaataacttttattaataaataaattataataaatacatcaaatacattttagatataaatatataataaattataaattattataaataaaattttattttcttaaaaatcaaaagataacttcattacaagtaaaattattctatagtataatagctataataactctctacaaagttcttatgtatgaaaattacacagaacacattaccagtgcggttttataaaccagggatcttgtcctaatgctcgccatctaccagtggcactgagaagacacaaatgtgttagtattaagttgaaagatatttgaaatgcaaatatgcagattcgggccccatgacagtatttctcttttcctctgttactctaccctgatgattttttaattcagtcatttgacatgtatgtgttgaatgaataaaatgtgccaggaacagatctagatggtgaagaaaacagacaaattgctgcccatgtggagttatgctctattggcaagagcaaggcgatccacaataagacaggtcaatgtgtaaaatgtcaggtgatgataagtgctattaagtaaggcaaagcaaagaaggaatatttaaaaatgctggtcagtgtatggtgggataggtttacccttttaaataggccaagcagcaaaggcctcaccaagaaattgaaattttatgaactgcacactcatatctaatatggccatgcaacaaacatgagacttctagaaaggaatatagaaatgatagaaaggatggttcctatgaagagttatatactaatttgttctttcagtatgttaaataaaggtaagtgcaagattagccacatgatcaatgcaatatattctgttataccaaggaggatggagcataacatgggcaatgaaaaatggatggatacaagcaatgaatcaattgtatggaaagttttccatacatgtatttatatttccctcatcctcattccagaccctgtaatgcaatagaatgtggagaaatgctcacttacttggtcagtttgagagaatacttcccattcttgactgaaatgttggagactcatatttatgaagcctaaaaaagagttccagattgcagtgataatttataaatagcatcacacctgctaccttccttttatgtgtgtatgtatgtatgcagaagtctacagaaacacatttctggaactttttatgaagaggaaattcacttacaaccaaatgtaaatttcgcattaataagaacgtagaactgtgttaatactgtggaaagcaaagcaagagcaaaataatcccattaaatctttaataatagtgaagaaaatctgtttagaaaatacttctttatggtgttagtttggtcccctgttttctgtatttcttatcaactgaaaattagattaaaattgttatctagaaaaagaaaataaatattcaattccaggaactagtggggcctgacaaacatagattcacatctgtgtgtctcaagatgctggaataaaagaactgagattcctgtctggaaactgttggattaaaatggaaattttatagctgtgataatctccttctacagatgcctttttaaaattgactattggtaggaattagaatttacaagagagcaaatgaaggatagaagagaaattctcgaagagtaaaaagtaataaaacaaggtcataggaaaagggaaaataagaacatacagtagggaatagatcttgataaattaccttttaaaacaataaatcttgatttatttaaaattgtaatgctattttctatattttttaaattatctagattatttgttcactaagtgatctgggttagcatttttccatttttaagtagtgttcatgtgaatgtttgtgtggatgtaatgtgtgctgtatacacagtctctaatatttttgtttgaacaaatagcaaaatgaaataaattactttatgagattgataaagtcctagagaaacagacccactgtagatgttccaatgaaaggtgtacttcatagtcatttttcaacactcactagcactgagtacacagaataacatggcactttaatcacaagttataaagataattttaaaacaattttatttctatatgaatattccacactgcaaggttgctttagaagagatgatcttgtatttttaaaactatattacaacattgccatatatatgtatactagaaaatattggatggtactgtggttattttttgtcaataatttctcaatcagttaaaactacgtgagacataaaacattccatagaattgagtcaatttctcaggtgtttaaactaattttgttttatgtttattactccacatgtctttatatcatttataaagtttactgaaattcattgattgatgctttgaagctgcttaaatcttgaccttgtacttatctaatttttataaaatagttgcaactatcttgtgagtataagatttttatatatttttatattcatttcctactggcacgttagtaccaaatatttagctggaagaacattttgagttattgatgtatgtactctactgagaaatgtgacaaggggtttttacaaaatttgcttatactagaaggtagatttttttactagctgatatataaaataaagcaggaaacaaaaagcttttaactgaatttaaataactttaaaataattttctattaaatccatcattgatatcatctagaatgcacctttccccacacatattattggagcattagtttaatatttgagtgtgaggtagaagtaaaaaaaaatataaagtaacaacacaaaaaaatcatgaagtagaacacaactttgttcatttggagaagtatccccttgctaagtctcactgagtgttttactgccacctctctcctcacatggcatttcttccttttttgtttaatcccccgaaggcccatattctgccacgaggaatcacacttgaaagcagtgtaacaattatgcatctctctgactcttgcttctgcccaagaattgagctttttagctgcattattaacctgaagacagatcatctgttctttctgagcatacttttctgtgtcctctgagacagctcaagacatttttccaacttctccatttctgccatagcactagtgagtgactttgagttgaaatacaatttaaaaataatacattctctctcttttttctttctctcgtttcctctgtcccttccactctctttcagattattagtttattaaatgtcttcacaccccagaaaacgctggaggagttccaagatgtgtaagtaacaaaactcatgaaggaagggagagcacagcactcagatagcccaagggaaaatcacacaccacacacacacacacacacacacacacacacacacacacacagagttgaaatcccttatactgctcaaagagaggtaagaggtggggtcaaatgaaaggggtccagtgatatgtaaagaagattctgtttgtggggttacttcctggaaagacattctgcctccttttggccttgtggctttatatactttgttgttccatgctcttggtcactcagggaaggcttatttatttatatttattaatagattccacaaactttctacaatgagttaatttacctgaagaaatagtaataaggccaggcatggtggctcacacctgtaattccagcactttgggaggccgaggcaggtggatcacaaagtcaggagatcaagaccatgctggccaacatggtgaaaccccacctctactaaaaatacaaaaattatccaggtgtggtggcatgcacctgtagtcccagctattcaggaggctgaggcaggagaattgcttgaacccgggagacggaggttgcagtgagctgagatcgtaccactgcactccagcctgggtgacggagcgagactccgtctcaaaacaaacaaacaaaaagaaatagtaataaaagggacgtgaaaattatctttattctttctatctttatagtgtcattgattttgtgcaaagtctacccagtagtgacaacagatggaggagaggaagtgattccctagcaccttgtctttaatacagatacattgaatttaatggaagaagctgtccttaatttttttcttatttgaaattataatattcacaaaagagttgagggaatacaggggaaagtgaaagcaaaattaaggtaacaaatctgtggacatgaaccagacattaataaatgctttttctactagcaaccttttggtagggttcgtatagctaacacacatgcaatacctggaaatgctcagtcttgattaagtcaaaggcagagctaagaagttcagaagacttacagagttaggagagcattctgactaaatcaaaggacttcatagatcttgtgatctggaactaacactgtggattcacccttctagttacttagtaatggaactgatggatgccaacttatgtcaagtgattcagatggaattagaccatgagcgaatgtcttacctgctgtaccaaatgttgtgtggcattaagcacctccattctgctggaattattcacagggtaagaacaccttctctaggattacaattcaaatgctttaagaggaagagtaactgtagattattttctttatacggggggcattggtcaaatataatatacttcctcatttctttgatactagaattagcacctagttcactaattgtagaaggaaattctagttatattgtagttgagtttgttcaatgttatgttttggctcattgagatgcagcttcttagaagcctcatgctttcagctccttgattggcagaagtcatatgtgcaactgaaataagaaaattcatttccatagatgtttctggcagcataaagacagcttccctgatctgttcttctgtcaggcctagaaatgatatatatgttgaaagatttatgttgtcctaaggagaaacctaacagaagacaataaatatttttttttctaaaacctcttcccaagattagtgtaaattgtgaaaatgataatacaattcttttctgggattaaaacactttccaaaaactaatagttaacttatttgtagcagtaatcatttgccttatttagagctctgtaggcaagggggacctcatcagtgctactgcaaaatggctatgttgattgagtcaatggaaataacatttcacttgatactggcttttaattttttcccttatccttactgttaggatttaaaaccaagtaacattgtagtcaagtctgattgcacattgaaaatcctggactttggactggccaggacagcaggcacaagcttcatgatgactccatatgtggtgacacgttattacagagcccctgaggtcatcctggggatgggctacaaggagaacggtagggatgcttcgggagagcagcatcaaaaccatgaatgaaacgggtgcacgttgtagatagccaaggggaatgttctcttttatgtacatgcttttataaagtagggctgccagatagcatattcagggttttttttaatactactggtaagaaacactcattaaaaatgtgaaggatgttattgagaagtcagttttgctagaagagcactaaatgttaatagtgaaaaagaattgtaaatggagtctgattaaacagtcaagcggatgctgattagcacacgtgcctagatattgagaaaaattgctatttgggttgcagctcagctgagcatgagtgtgaaagcagaaaggaatctaccacagttagccatgtggcttttatgttgtatctcagactgatggctgtagttctagaaaaagacaagcaaaaaagtgacacaaatccttagagtgaaaatcttcatagacaactttgaaataatccaaattatttaaactgaataagaatttctgtaataatttaagctgctctgtaagaaacatttagagtagcaattgcctaataaatccttatatattccaaaaatcgtaaaaaaggaaaatgtcaaatttgacactactgctttcataaagaaaacttaatgttcatgaacactttaaaatgaaggctatggaaggaatcttaaaaatgtatcacaattgagtgtagttgattaaaactaaggatttattaaatatgttagaaagcattgcaatgtattattttgatgagactatatcttacaagtaatgcaccatattgaaaacatattcaatatacttaggaattaaaatagttttaaattaggattgtatatgtattcagtgtatctttaatatttatttttatattctattctatttagtttttagcagtctgtattaataagttttataaaaataatcagtgtatttttatgtacaggtgctacagggtacttttgtgaaaattccctggccactgaagtttacagaaacttctttgtatactcttagattagaagacagataatgtatgtatgcatttatacagaggaagttaaaaagtcacctcttacaaaggtcaggttcaccctggtgggcaatatcggagttctggtaccttttgactcagaagagatgaatctagccctccttgctaggcaataccacatctaatttattcagaaaagaagacatttttatactttcttcacgagttatttttaaaaagtcaaaggagaaacaaagtcaagaatcaagaatgtacaggagactggggggtggggcggtctgaatttgcctatttgggctttcagatcttggcactaccaatagctggtattaaaatccctttcccttccctcactagaaggaattgcaagttgctgccttaggtttttgacttctctaagtccatggaggaggcctgcctagcaccctggtgctgccctcccaccaatgggaggaaggttatcatgcagaaaaacctgcttgctcccacatcaggcatgccctgctgtcccctgcacctagccccgccttccttccccatggaacaattcggccaaatgattctgcccaaaagttccctttgtccataatgaaaagcaagttggaaaggggtaaagattggtaagagaaggcaaagcatgttttcctaacaagtttgacaatttggaaataaatatatgtacataacaatttttaacacctttaatacttttttcactttccttccagatgactcctttatacatgtgctaattcatcatatgtcttttttcttgaaatatttcaaatggaaactaaaactgatgtttatttacaagaataaacttctgaaggaaaagctaagtcccaaataccaggaattccaattcttttgcctctaaaccatggttccagtcatttcctggtttattggatttggttgaatttatcttgttttgccccggccccctggccccctgaaaaaaaaggtggtctcttgttgccctattctctgtaactgaatagaatagaaaatgaaaatagccaactctacaagttaatattgttttctatgcatccggaaaatgacacagaaaaccctttggtggcttttagctgtcacctgccatggagatacttttggtttagctattgcttttctcagtcaccaatgtcaccactttgtggcactgctgagaggcaatgtaaggcacccacaaagtaatgggtttttaaacattaatttgagttctcatactaaacactgtttatgtaatagcatagcgctggtttgaattcacattttggccaacttttggtgggaggtgaaaattgtacttttaatcaaactgttctttttcctcctccttcagaagtcaattatcttagttaactttactttcctcccttttcttcactaccctctctctcctgttctagtggatatatggtctgtgggatgcattatgggagaaatggttcgccacaaaatcctctttccaggaagggactgtatccttgtaccttttgctacagctttacctgttttgttctctctcccttttaaacacataatgattttaccaggagagtaaagatagaagcaaaaagttgggtaagtggtgttattgtaataaaaaagtgataatttctataatctgaccagtactgaagactgcctaccacaatgatttcttttaattaaatttcaatgggcttttttcttctaaaattactttcttgcctgcaactaaaaatagaaatgctatttttctttaataacaaaggctaccagatcccaaatgattaaaatatatttacctttataactagcaaaataagtcactatttgcaagtcattttccatctcctttctaaaactattttgtgcttctacaatatttaggcataataattgctctccttgctgacattctaagcttctgtctatggctttgttgatttaaattactcgacactaaatcaagtctttaacaggtcaatatagcatatcttcctcaaaacatgaacttctgcatttaaaaattgtaattattgttcaagttgctagtggtcaggtgagtttaatgtagacttctctcacctgacttggagatgtgacatagacatacatgcttgttttcccaactaaatttataatttcataaagcaatttggatttaagttctactactgagtcctgcaatagagtccatcagaaatttcttgtagagctatctatgatttggaattatcaaatgaactgatacatttcttaaatggccaaaaattcactctctagtaaaggtacagatttgtgtttgtaatatatagacaataaagtttacatataatagtataatatacttttaaaaatacaaaaataccttactacaaatactagtgcaaatctaagtacaatcaccattgacaactttaacaattataatacaggattgaatttagtatatttattacatatggatgttttggaaattggcaataaccatgtgacccataactctattaaccattctatttgattgataagaaagttttattaaggaatccttctattatgtaagaaaggttatgatttttattgaggtgtttaaaaagtccaatagtaaaaaacaaaaacaaaaaaacctgactcaacaagaagtgggtaccataataagcttgtatttaggtaggtatgtattcattctgctggatattaatgagatagtctctaaaatccactagtaatgtaagagtgatgacatattctagaactgcactgtctagtaggtagccactagccacatgtggttattcagcacttgaaattatagtctaaattgaaatgtgttttatgtgtaaaatgcataccagattttgaagatatttttaaaagcatgtaaaatatattactaataatcttatatagcttgtgttaaggtgatagcattatgaatatattgggttaaatatatatatctttttttattcttttgaatgtggacattaaacttaaaactacgtatatgattggcatttgtgactgtcatttttctattggacagtgctggtctagaagataagaaaaccacatggcaaccatttatttataaccaatcttaaggtcttgaatctctgtttgctccatgttcctttcctatctatagtgtgaagtatcattttcaccattagatttcatatggctacttaggaaaatttatttcactttacttatctatagtttggggattaattatatacctaatatagtttatttgaacaatattatagtgcacattcatatttaaatgtgctgactttattcaaaagtaggaattattttctttatgcttttgcctttggtatataacacattttagacaaaaaaggaacctctcaatcaatactcagagtgaagttgcacagccacatctctctcatgcacttgtcagtggaaagcaaaaagccacaggatttctcatttccatgtgacattttgttacatgtcacttgatttcatgtagcgaggttgttctctgagatcttatttagctcttcaggcatttatgcggattgcttttcttctattttgacaatattaaatttaaaagccaataaaagagaaaaaaagcaaaaagttttaaactcaatctaacccttcagaaaaacaaacaaaaaaacaaagcaccatattgataattttattttcttttaaaaatttttctcttggaggtgcccctcccaccttttttaatcctagtttgttttagaaaaatttttggagctgaaattaaattgtgtgaaaattaatacataacatttatatccttgatatgtatgaacctagacatttaaataatctctaatacagataatgtagattataataaaggtttgcatttattatataaatatatatatttctttatctcaagtgatgattacatagtacagcagtctttgatagcctagtgccatatgtgataatgaccctgcatgtggacctaaaagttaaaaaaaattgcataaagacacctacaatggaaagccttttacttaagttaaattttaccaaaaaatgagtagatattttccaatgaaataggttagaaaaaatgtttcctttttgaaaatgtttccatttggatttcttagccccttttacctataattaaaattataacttaatgtttaaagttatagttacatttaaaaaataaacctatagaaatctcagttaaacaatgtgctttgttaattttgagtagaattgttttattaatctttaaatgaaattattatcattttatgcacaggacttcctaccaacaactgagcagtcagataacctctcaaactatgactatcagacacaaggctgagggctgattcaagttatttatcggcagaagaattacacaattttaagcatattgaaattagtctaacatttattggaagaaatatcaaagctaagtatatgctaattgataccttgactacttccaggactctgcagaaatttcaaaaaacaatcagaggttctcatgtctttcacctagaattattcagagtaatttatattaaattactttgaggctgaaaaatgatgtgataatactatcataataatcaacatttttcttctctcttcacagaacttttaaacttgaaccctaagcaaaaatagtaaaatgtcttgacaaatcagagaatcttatgaaattgtcattgatgactgaagtttaactactttcccacattcaaactatctttgcattttgagaaacatcgtgggggtttcttggtggttgatatgatctagatgatatcacagggaattgtcttggttactgaattagaatgttggcaaaataaaattgaacaaaataaacaatacatatttgcttttccacttattaatttgctaattactttaatatccagaggatcacttcttaatacttatttttcttgtgtaaagtgtttcttaattatgcatacactatcatacacttaattttcactatagttttatgattaaaacatttcatagcatatatttttacataatgtagtttatttgaacattataatgcacattcatatttaaatatgttactaaacattctttaaacattcttaaacgcatgctgactttcaagttagagagtagtaaataggccaagtccattatttttttttatgtagtccaaagaacagataaaagaaatcagtgactttagcttcactcagattttgttcctttcaataaaatttacaggaaagcagctttacaatgcttccttagaagttttttctaagaactatccagtcattcactgcctccaccaccccaaaccccaaccaggacatgccatcttgttgattatcaaagactcctatagtcccagtataattttcatgagtcctttcctcaaacctgcttcttttagatacattcttcaaccttattttttccattctacttcaaatgatagcaccttctttgagcaaaccctgtgatgtccctttatctaagttcttggccaatattctctggatataaagttaaagacaggcatactgcatgcatttgaaaattctggacctcaagtatattatatccaaagctaacagctggactgctaaaatagctcctcttgcctttccctctgaagaacaggaaattgcagttagaatgaaagagatatacatataaccttgccaaggagccaagttattaaggaataggtaaatggttttccaaaagtatatttgaagaaataagaaaaacaccctcaaattaactgaatgctgtatctttttaaagtttgaatatgaacattaggaaggatcaaagtaaaatgaacaaaaatttgtggttacagattgttatatcaatctagcacagagatattttaaaattcttcttacctctttgaaataatagtgcttaattcctaataaacttttgcaactaacaacttactatatagtctaactctttttcttagaattaagacaatacagagttatttcaaacaatataaaatttatggttttaaataaagttaggatgaaacaatttagtaggcattctttcaaatctataagcaaattgcatgtaattataaataaatatttaaaaataaaattattatttgaatttgtttaaaagaatacatttttaccactagtgtgcctgctaactcttctcttttgttattattttatgaaaatgtgaggcagggttcaccagaatgggagctggagattctgaggttgtaaagaaataaaagcaagtttaataggtagattcaaggagaaagtctttttctgatttcctggcattacaatatttagcattaagttctgcgaattgttgcttatttttcttacttagattcacatgtgcaaaatatgtacattcttagtttatttatgtatatcagtggtcttttagaattctgtctttgaactgaagtttagtacaaggtccttttgttaaacaactaaatttatgacttagttaactaattttaaaagaaatgttctaattttataactgctaactttataacttataatttttataaaaattataacaaataattttcaaagaaatgttctgattttagaaaactatattaaatcttcttgctattgtgtgttgagtcattcattgagagaaaatttgtctaaattctacactaaatgaaaatatacttaggtgtgttaaggagaagtctcagaaattgtgataaaagagttacgtaatcccccagagaggaaacattttccaggatagaagctcacatagtctcaaaattatttaattgtggatcataatttaagctattagatggagtgtggaagtagcaatatagttctttatttatttagatttaacttccagggcttacattgtataatttctatctcttggttagaagtagaagaaagataatttattataagctaatttctgacaaataatgtgacatgagattttcagaggttctcactctgaaaattaatcatattttggtaacaccaaaatttactcaacatttcttctaaggaaagtgactcagcatctgattgttacagttgcaagtgaatctgccttctgcctatgggaatgatagaatgatgatgaaagaatgtgatgaatcagaattttaaaagccaacagaattctaccttggcagcattagtgtacagaactcttacagagacccagatgctgtatcagattgtttcagaaagcataaaatgcagtttccaacagtgattgaatttgctaattacttctaaggtctatgcacagtccctattcattgtaatacctgacaatttcataaaataatctattcttaacttcattagcaatatatatatatatatatcactaatatattcagatacatattgtattagtatgtttatgtatcctaatatagagatattagtagagggaaggcttactactactaccttcctgttcaataagagttggtatcaaattcttttattatacattttctgttagtggagatggcaaattcatgaagtttggtacaatgagtttatcttgagccataatcctgtcttgaatacataaaaatctatataaatttatgtgcatatattcaatttttgtaattcaagataacagagcttatcatttctaggcacaaggcttagcattttggtagcatagatataaatattctctaggaatagtgaatggtgagtaaagttaaaatgggaattagaaagatttccaggatattatcacccataaagatatattaaaataaagaaaatgaaattcaatatgtacatcagaatttcagatctagagcctacatctctgcattatttttatgcaaaagatttgtgatctattaaatctattttgagttctgcccatgaagatatatattttaaataaatattcttcttttacattggagtatctcccagatcccccacaccaaaaagagaactgtgagatataccagttattaataccagttattaaatcaacaactgggccaggcatggtgtctcatgcctgtaatcccagcactttgggaggccgaggtgggcagatcacaaggtcaggagatcaagaccatcctggccaacatggtgaaaccccacctctactaaaaatacaaaaattagctgggcgtggtggcgtgtgcctgtaatctcagctactagggaggctgatgcaagagaatcacttgaacccagggggcagaggttgcagtgagccaagatcgtgccactgcaatccagtctagtgacagagctagacactggctcaaagaaaaaaaaaaattaacaactgtatagaaccaactggtgctaaagcaacatagagaccagaatttaatttaggccatctgttgttattgttgttgctgttgtttaaaggcatgtgaagaacagcaaaaaaaaaaaaaaaaaaaaaaaaaaaaatcaagggattttagcctgaaagataaaattggccagttttaggagaggaatggttagggattacaggttatagttacatactttaaggttcttatttggatgaggaaacacagtagttcctgtttacatagtgaagagaagttccatagagtcaatgtgagtcaatatgtaggatgcctttctaagtggtttcaacaataaaatagattgcctagtgagtggtgagattcctccactggaaagatttctttattatagatgtaaatatataatataattatgtaaatttaaaataaataaaccttttccaaagatatttaattcccaaatataattttaatatattatttaatacatgatgatttgatatgtaaataatatttattggggacttgctatgtaccaggcagttgtgcaaggatctttatcagacataactttttcaagtcttttataaaactctacataataaatacagcttatcatcaatattttaggggataaaattgaggtttagagagaagtaacctggccaaggtcacatagttggaaagtaatagaattggttctctagcagaaaaagatgaatatattgccagagatattgtaaaaaacaattttatactaaatgagaaatagaaatagatgtttcctaagtcccagacaggttaatggcagaaaccattttttttctaaacatttgaatggagacaggcaagagaaaacactgcatattgagatttttggtctcaatgttttttgtatatctcttccacaatatctataaaatatagataatccataaatagcaatttagtcaaactggtctctttggacagtatgataggaatacttggaatttaaaaataaatatgttttccgtttttttctttaatcaaagatttctcaataccatcctgttgtgagacagatattacttgaaattacaaacacgttaataataaagggatgcacaactgtttgctctatctttccctgatatttctgcatgtcagttgctttcctaaactggaagcaaaacaaatttgcttctttgggtatgcttatcaccttcaaagccgtaaccgtttctttgcagtgatcactttgtttaggtgttaaatcaaacaatggaaactttgagtttaacccgagtgagattttcacattggaatgaatctcatgaggatctctttaaggtcactgccaaattacaagatgtaatttgaaaagtaagtggagcaaaattatattgtgctgctatcttaatgcctttccctatttgctcccccccagcatccctaattcttctgtttatttttccccccacaagaatgccctctctttctgatttttaagtacaacaagtgagtaaccaagtgtagctcaagagagagatttcactttcttgcttcacccttccccattttgcccctccctctgtgcgctctgccctggcttcctggttttaagttctggatgatacttggcaataacagagagaccattataattccaccttgaattccaggtttcttttgattcacagtttcagaagaagtatcagctctttagtcatgttgtttatttcacattgagcgatcccattttgaaagccagcttttcttatcattataaggcaactgtgtttataagaataagacaaggcttcctgctgagaaacatgctcctttgatgagagtcaatgacactaagacaacatattctgaaacattcattcttgaactggcttttcacttctggaactgtatttatatttataaataagggtaaatgtgttttataaaagaaactcttttgaggttgctggcagctcagcttttcttttttcttttttcaaatacgtatacaagagtaaaaaagaaactgatttgcatattaacactatctagaataatttatgataaaaatcagtaggattctagtaaatgaatgcaaattagaccttttaaatcaaaacctaaattaatcattgagttataattgcaaagtaatattattctacattaggtagcattgggtagtgttgttatttctgttatatgacagaaaagggccttgagagcctatgttctcccctttccaccatttaaaatgctaatgatcatgccactggcctctcatccagtcagtgaaaagtcagactattgctctatggcatgagtagcccagtgttttcatttatttgttgttctattcctgtgttcttgtttatcttcatttcatttttgttttcagttgacatgtggtcagtagggtgcatcatgggagaaatgataaaaggtgcagtgctgtttcctggcactgatcgtatccttcttagcagccagtggtatctatgggtgtcactctcaattaattcccttttgtctcaaatgcagtactgcttatggtatttgttcactgtccttagagagtttctatgagactcaatgtcaaatatttacaagttggcattatggcagagtaactttgtctcctagtaagaccttatgtggataatacagtaacaaatatgaaagagtcaacctgatatcaaaaggtctgccttaattcagttctaccaaactgataacattgagtactcttctttcttgtttttgttgtagatgtttcaaaatgaagatatattcatagctagataataaataaagtctttcagttctaagactgaagatttatactttgatataatgagaaatattcatttggcatggaaatttttatcagattcatgttcctccacaaatactaattggtttattttaacatatattcagagagcatggatgtgaatttcattttacaattgatcaagtttttctaaaattatttttcttattcactccatttatgggaataatagctctaattccttctcttattttctgcatattattaacaagtgcaataattaaaacctcattaataatggttatataaaatatctgaagaaatacattgaaatcacttgaataagtaaaagtgattctctcttaagcagcaaataattaacaagtaaagatcaagaccagatgtggtagctcatgcctgtaacccccaacactttggaaggctgaagtggaaggatcacttgagcccaggagtttgagaccagcctaggcaagagagcaagacccttgtctctacaaaaaacaaaaataaaaaatttagccgggcacggtgaaagtccctgtagtctcagcaacaaagaaactagctgggaggatagcttgagcccccagtgtcaaagctgcagtgagcagtgatcgtgctgctgcactgcagcctaggtaggcaacagagtgagaccctgtctctaaacaaacagacaaacaaacaaaaagattccagaggttctgcagtattaaatagatatgaatagtgtgcgattagtgattagtatatggatgtgtcatgggtcctgttaaatatccctctacacttagtcacttatgaaagttttatgtcttcatcctactaaaggtaaaacctctgctttaataaaacacttcaaaaataaaattgagcctataataatggggttttaatgtgtaattagactaaatctaattactaatatagtgcatccataccatattatgattagccatttgcgttgtttctaatatctacattataattttttatcaaatgtctataatgtaatatacacacttgaggattaatatttgtatctggttttacatatatgaatatatatatatggcttcatacatatattctctctacatattaaaagaaaaagttctggaaatggctgtattaggcactcaatttttgttggaagaaaggacttaaaatacttcagttaaaaatagttacactgtttttacttctgattattcttactaaaaacttttttctaatcttctgtttgacacacattttaaaaagtctttctgtctatagtgctgttttgtcttctaaatatacattttattaaatgacgtctataatttaccacatcaacattaatgctatttgaaactagctggctttataaaaactgaattccttcagatttcttaaaaatcaggagggattttaaaaaacaggacttcttttattcccaatgaattataaacttgtgtttggcctttgggcatgaatatgaaattgtctttaagttttggctgattttagataatttgatgaaaatagactcaatttgttaacttagtactctttgcttttccagaagttcattgtggttgaataattggtgactaaaatgaatatttgccacctgtaaattaaaatgagtgtttttatgatctttgttatgtttctattaagaaaaattaaaacagatttctacaactgaattaccaaatacaatttaacattttttagaatagtttcttgggaaaagttgctcgtgtgtcattttttaacttgggtgtcaaaattccttgtaaacaatgctttagggctcgggtaatgtggcagtatcctgttcaaagcccttgatatttggatatgaagtcctttatggagctcttgtatggggacatatttgtaaatttcttggaggacaaataggaatcattttctaaagtatgtcttctgatcgtgggctgtggtctcaatgatttcaaacatgttggttaaagttttaaatcagtcttaaagcaaacaaattttgaacactgaatatcaaataattaacctcttaatgtataagacattactgatttaaaaaattctgttattagaaatgagttactgaaaatacaataaaattatacctaaatctattaaatagagacattaaaatagagctggagatatgccatattataatgtatacctatatagtacattataaggagttatgttatttttagtcaatatatcctcatttatataaaagcattctcaaaacaatgatttctaaaagctcttggaatatgagctatgcatgactttttttaatttttaatttttctgggtacataatagctgtgtatatttatggggcacatgagatgttttgatacaggcatgcaatgcataataatcacatcatggaagatggaatatccactccctcaagtatttatcctttgtgttacaaacaattcaattatactcttttagttattttaaaatgtacaattaaattattatttactgtagtcaccctgttgtgctaccaaatactagatcttattaattctttctaactttttattttagccgttaaccatccccacccaccacctcctctgctatcctttccagcctctggtaaccatccttctactgtctatctcgatgagttcaattgttttgattttttaaattaattttaattttaagttccagggtacatgtgcaggatatgcaggtttgttacacaggtaaacgtgtaccgtggtggtttgctgcacctatccacccattacctaggtattaagcccagcatgcattagctagttttcctaatgctctccctccacccacccagctcccctgacaggccccagtgtgtattattcccctccctgtgtccatgtgttctcattgttcatctcccacttgtaaatgagaacatgcagtgtttgtctttctgtgcctcgcttatttcacttaacatttttaaatgtaccacattttctttatccattcatctgttgatggatgcttaggttgcttccaaatcttggctatcgtcaacagtgctgcaacaaacacggcagtgcagatatctcttcgatatactgatttcctttcttttgtttatatacccagcagtgggattgccagatcatatggtagctctatttttagttttttgaggaaccacagaactgttctcctagttattatgataatttacacttccaggaatgtgcaagtgttcccttttctccacatcttcaccagcatttgttgttgcctgtttttggatataagctcttttaaccggggtgagatgatatctcattgtagttttgatttgcatttctctgatgatcagtgatgttgagcactttttcatatgcctgtttgttatttgcatatcttcttctgagagatgtctatttaaatcttttgcccatttttaatcggattattagatttttttcctatagagttgtttgagctccttatatattctggttattaattccttgtcagatgagtagtttgcaaatattttctctcattctgtaggttgtctcttcactttgttgattgttttctttgctgtgcagaagtttttagcttgatatgatcccatttgtccatttttactttggttgcttgtgtttgggaggtattactcaataaatttttgccctgaccactgtcctagaaaatttccccagtgatttcttaaagaagattgataatttgaagccttatatttatgtctttaattcatcttgattggatctttgtatatggtgagagatagggatctagttttattcttctgcatgtggatatccagtttttccacaccatttattgaagggactgtcttttccccagtgtatgttcttggcacctttgttgaaaatgagttcactgtaggtgtgtggatttgtttctgggttctatcttctgttctattgatctatgtgtctgtttttatgccagtatcatgctgtttggttactatagttctgtagtataatttgaagtcaggtaatgtgatttcctccaattttgttctttttgcttaggatagctttggctgttctgggtcttttgtggttccatataaacttcaggattgtgttttctatctgtgaagaacaccattcgtattttgatagggactgcattgaatctgtagattgctttgggtagtatggacattttaacaatattggtttttccaatcaatgaatatgtaatatctttcaattttttgtttcctattcaatttttttatcagtgttttatagtttttattgtagagatctttcacttgtttgcttaagttacttcttaggtattttattttatttgtagatattataaatgggattacacttttgatttcttcttcagattgttcactgctgtcatatagaaatgctactgatttttgtatgttgattttgaatcctgcaactttactgaatttatcaatttgaatagttttttgatggagtctttgcttttgcaagcataacatcatatcatctgcaaacaagagttacttgacttcttcttttccaagttgagtggcccagaaaggcggtccaagagccaaatcttgaaattggtaactcaagagcctgcttggcactctacccacactgtggccaagctggtacctaaggtacaagacaaagtcccctttactttccctctgcttttttgtctcgccccatagtcaccacaactgggaatgtgctgagtctcacctgaggccagcaagtctcagagtttcacccaaggccctcagcatagtacctgggtatgctgctggttattcagggaccaaggactcttcagttagcaggtgatgaatcctgatatgactgggtctttctgtttaaggccatgggttcccttctgtcccagggtgtgtctagaaatatcatctgggaactggggcctggaagggaggcctcacaactctgactggtgccctagcctactgtggttgagctgatatccaaaatgcaagacaaagttcttttcactctttcctttcctctcctcatgtggatggaagaggtctcttttggagccatgagctatgcaccatgggggtagaggaggggtgatgccagcacccccttagctgccctggctggtatctcagtaggtcacatgccccaaaagtccattgactctgggcccagttcaggactaggactttcctaggagttgcagtcctagtgacctagaaaggcagtgacctgcctttcaagtttattctcagcctcagagcagtttagcctgcagtggtaaggcttgtgggatctcaagttctgactgctgggattggcgattcccctctggccagggctggtttaaatgctccttccgtgggcaggtgtcagctgaatttggtttgtttttactttctgctataacaagggcagcactgagttcatttcctcacaaatgctatgctctccctctccccagcacacggaattgttgctggaggatggggaaggggtggcgctggcaattaaagacagtttctcctgcctcttcagtgcttctttcagcaatgtggaattaaaaccagatactgtgagtggtcatctgatttttggtccttatgaaggtgctttttggtgtaggtagttgttaaattggggtcctttcaggggggatgattggtggagccttctattttgccatcctgctctgcctccccagacacgtcttcttaatatatgaactaactcaagaacaaaacttaaaatgttaaaaagatattatatcttttatcttttgggcctaaaaaggtttaacacattgtttttagtaggtattttaagtatatgtgccaagtctgtcccgcagactctggctgagtgatggatgacaaaagtactctgacacaggtattttgcctgacagcatggctagatggactgcaccccttagcactgccaatgaaagtgcagtgcaacccagagtgcagcccccataagcctgtgacacttgcatttatttagtacagatttaatgacaaaggattggagcaaacacaatttgtgggtaattaactttgccaaccccctgagtagagagcagtcctgtgcaggaatgatcaaaggttggtttctggagacataagtaaaccaacttatctagataagttcctttacattcccttgttatctaccctttgccttcaggttctggataacagaatttggctgccttcagccatttctccttcgaagcttttgcaaaacctcctggccttccaagaaggtttgagtctttccctataactttttcttacaacttttcccgccaccctgactgaactcctacatatatgttaattgaattttattcaatcaaatgtgtttttaatgctctacaaatgaatcaacatttaactgttgggataatttggaaggagggggagatgtaatgaattttatcatagctgacatttttacttaagaaattataaaatattttatattaaacaagtgagttaatatgaaatgcatagcttttgaagaagattaataaatagacacacatatgctaccactcaggttaaaaaatagaccattaccaatactttcaaatatttttatgtgctccacctaccacaaccttccttttccacacagagttagccacagttctaaatatttctttttactatctctgtgactttccttatgtttttactacctgcatatttatccttaagcaatctatggtttagttttatttattttacataccatactgtcatcgttatcttgtgactcactttttaaaaaattaacattatattttttagatttattcctgttcatggactggacatagttaactcattttcattgctgaatagtatttcagtctatgagtatctataactaacccattatcctataagtagactttggaatatatacggattttactgtttttttttttcttttataaaccatggtactataaatatatgcttataagagcacatgtgcaaggttttcttaataacaatgccaggggtcataggcatacacattttaaactttgctgtgtaacatcaaattgatttctagagtagtatgtagctgtctgctccacatcctcatcaacttttgccattgtcatatttatttttaaatttgttaccaatcccttggatataaaatactatttcactggaggtttaatttacatttccttgtctacaagggaggctaaggatcttttcctgtgttcattggccactattattttcccttggtaaaatatcttttttataaacaaagaatgaacacatttttttctattgtgctttttttttctgttgattagtagacattccttatataatttggcacctaatttttgtgagttttatgtgttgcaaatatcttcttgtatttggattattttcccattttattttataatagttttagaagttggcaatctgtcttttcctataatttatatgttttatgtcttaagaatccttttataacattatattgtgctataactttactggaaatattttaaagtttagtctcttacatttaaaccattagtccacatggaattgatttttttgtgtatgtgtgaaagaaggacctactttattccagtttcatttattgactaacttactctttcttcacagatctataattctgtctctctaataagtttccacatatttgcagggggatgttaagtcctgggctgtatattctgttccactggtttgtttgtctatctctgcaccatgaacaccctttcttaatgaatataaatgtatgctctgcacttatattaggtaaggtaaatacctttcatttttgtcatcttcagaattatcttgactcttaatgcaccattgctcttctattaagattttagaattggcttactaactttaaaaaaagatccctattggtatttattttggagtcgtatttaaagctcaattttgtatacaatgctattttaattaagatgattcttttaatctttcttctcaacataaaaggatcttggcacatgttcatttagatagttgttgtcctgacttaaatatgctatcgatgttcagtattttagttttctttttaggctcataaattgacaatattatgatttttttgcataaaggtagtttgtttagattcacccttatgattgccatttgtttggcttaccactacttcttacattttgaccttttattttgagattattatttttttctcccgaagtacgtattttggaagtatctttagtggagtccttgataataaaactcttatttttaattgaggttcccttacctgaaatatagtttagttagatatagaattttacattgaaatttattttatttttggcatcttaaagatattattctacttgctttttgtttacagtattgctggtaaataaagagttgtcagtgtaatagtcattttaggagataatctgctcttttccttcatttgggatttttttttttggtctttgattatctgctgtttctctactacgagactaggcatggatttctttttatttatcttccttgagagtcattgtttcctagattccaacctttattcaattactggaatttctcagctgtcgtttcttcgaatattttatttttttcattctttatattatgtgtgtacaaaactctggacataaaatagacattcatttataacataaatatttttgagtacctactatgtactgggtactttttgtctccagagatatattagtaaacaaaacagataaaaattcttattaccatgatacttacattaaaaggtgcagaatactagaagaaggtgataatagctgcagagtaagagagaccaaaagaccaaaatgctagcatgggggcagggattacttctatcttcctttttaaatttaaatatcaaaagttttttcagctatgctttaagtggcaggttttcttacctcatataagcttgattgcctcttcttaacttccattgtatgtagtgttatatacagaagtgaaagtatctttcccgatttggtcttacagaacagagtacagtgtccttaaatttctcttaagtagattctatatttctgttcgtgtaggctgtttgtatcagcttctttgtttataattatttaccaaattgaaaaggactttaatatttttcagctttaaaatagagatgccaaattacatgatctccaaggcctcttctcattttcaaaatactatcacaggctgagagaatcaaatccagcatttttgaggtcagaatatcatacaactgaaggtgggtgctatttacaaaaaataaaattaccagtaaaaaattagtcttgtaagaggcctgtgcaaatggaacaccccaaagattaaccttcaacagcttaatgaaaattctgccattgctacacatattaatatatatgttacatgtctctccatttttttatttgtaagtaaagatagattataatagtgaatagatttatagcatgcttcaaacagcctttggatattccatgtcccttattataacactagcaatgtgctagtgtcagtgtacaaatagccttttacttaatttgccagcttcatattttggatgtgttttggcttataattcctcttcctatgctcatttataattaaaacagatgttagttacaattgtttattaagtcacttattcatatttcctgttaccagaatctgacaaggacttttgagaggaaaagaacattttcaaataaaaaataccctaaaaacatttttctttttctttttttgggggggtgggggacaaagtttcactctcgttgcccaggctggagtgcaatggtgctacctctgcttactgcaacctgtgcctcatgggttcaggtgattctcttgcctcagcctcctgagtagctgggattacaggcatgtgccaccacacccagctgcttttgtatttttagtagagacggggtttctctatgttggtcaggctggtcttgaactcccaggctcaggtgatcctcccgccttggcctcccaaagtgctaggattacatgcatgagcctctgtccctggcccctaaaaacatttttaaagaaacaaaacaattagaaacataaccatgaaaatctagattcagaactctatcatatgtttgtgtgtgtgtgtgtgtgtgtgtgtatatatatatatacatatgtatttccttatacttgtttttagaaaaaaattcttttaacaacaaatttaatcacaaagaactataattagtactttccatgggtactactccccaggtaatagcagcatacaatttcagttctcccacagatgatgaggggcagaattcttctccctctactaggagactgcatgtgccacttactgtaatttcccatggcctttgcaggaaaattacatggggcaaagaaataaagatgagcacttttctttctctgagtattctcaggtgaatgacccccaagttaacaaacaggtgtggaataatcttttggtgaatttgatcctattctaatttgtgtcataaaactgaaacatgttagtattttactcttacatttggacttagtaactcacaagagactttttagtatattctacattagtatttctcaaaatataatcccatccttgattacaattaccactggtgttttttatgatatcagcccagacctgtggactcagaatcttgtagatcaatgagtagggaggagggatatgtatttttgtaagttccctgcgttacgaatattcaagtttgggaaccacagtttaatataatgatgcttaacacatggcatatgtgcttcaatttccttattgtgcatctgttgcagacattactaactgatcacaaaattctttcctacgaagctaatataaagccacacaagcctactcaacattgtgcctaaacagctgtttggcgtgcatgataaaagcctctcctggaactattctataacgacattgctattaggcaatattgtctttaagaacatagctaataatttagagataaacactgatgttctttaaattgcaaagagaggtcagaaaatttttgcacaaagtattggatataaggcctagagcagagtacaaagcaagtcagaaactatgaggtgttggctctggaaatcacattcatagtaacaaaaagcaatcaatgatagaagaaaacataaacagaagatatagtcattcaaaggaaacaattggatgaggccattaaatagttccttatgattccacttagtaagttctgaaggcttaaatatggatggcataaattctgttcataattttgacccacaatacgcagaaaaggattagtcttataaggggcctgtgcaaatgagaggcccaaaaattgcccttttcatatattatgttcaaggcattatcgttttagaaagttccctaacaaaggaagctaaagtaagagaagtgcttgaaatataagttattagctaattgataatattaattggaaaaattttcaatcttaggatttcagatactcatttttactattcatatttactttgttttattctattataatactatttattgaataccttagtaatatcacatttgtacattatctggacatcatgccctacttataaaattgaacttcttacaatataactctacttttatgtagtcaatttagaattatatcaggtgatttactgtcaaataattcttattaaatgccatttttccatttgtattcaatgcatttcataatttatgttaagggtgataatttctgaaacagcacatcaaaaatataaaaaatatacttattgcttttctgataacctcacagggctaagatctgtaaatccttactctatgtggtataaaaatggtaatttatgggtattctaaagcaaataaattcttctacaaaaaatggttttggtcattctttaaaaacatatttaccatgttaacaattaatacataatcataaaatctagttaatattttatgtactttaaaaatgtaatccttgtggaaatctgttttcccatttaaaaatcaccttattttctatataaaatattgataaaattaattgttttacaggaatatgttggcctgatagactaaggaaggggcttcagaaacattctttaagggagttgcttgtgacaaaacacaccattaactttatggccaaattaaaacaattttttaccatatcaattccaaatttactttttcttactggaatacttgaaacaagcactgaacatggaaacaggagataggagttccagtcttcgtttatgttaggttaattgttattataaagaaaaatcatggggaggagccaagatggctgaataggaacagctccggtctacagctcccagcgtgagcgacgcagaagatgggtgatttctgcatttccatctgaggtaccgggtgcatctcactagggagtgccagacagtgggcgcaggccagtgggtgcgcgcaccgtgcgcgagccgaagcagggcgaggcattgcctcacctgggaagcacaaggggtcagggagttccctttccgagtcaaagaaacgggtgacagacgcacctggaaaatcgggtcactcccacccgaatattgcacttttcagaccggcttaaaaagcagcgcaccacgagactatatcccacacctggctcggagggtcctacgcccacggaatctcgctgattgctagcacagcagtctgagatcaaactgcaaggccccaggagggctgggggaggggcgcccgccattgcccaggcttgcttaggtaaacaaagcagcctggaaactcgaactgggtggagcccaccacagctcaaggaggcctgcctgccactgtaggccccacctctgggggcagggcacagacaaacaaaaagacagcagtaacctctgcagacttaaatgcccctgtctgacagctttgaagagagcagtggttctcccagcacgcagctggagatctgagaatgggcagactgcctcctcaagtgggtccctgacccctgacccccgagaagtctaactgggaggcatcccccagcaggggcacactgccacctcacacagcagggtattccaacagacctgcagctgagggtcctgtctgttagaaggaaaactaacaaacagaaaggacatccacactgaaaacccatctgtacatcactatcatcaaagaccaaaagtagataaaaccacaaagatggggaaaaaacagaacagaaaaactggaaactctaaaacgcagagcatctctcctcctccaaaggaacacagttcctcaccagcaacagaacaaagctggatggagaatgactttgacgagctgagagaagaaggcttcagatgatcaaattactctgagctacgggaggacattcaaaccaaaggcaaagaagttaaaaactttgaaaaaaatttagaagaatgtataactagaataaccaatacagagaagtgcttaaaggagctgatggagctgaaaaccaaggctcgagaactatgtgaggaatgcagaagcctcaggagccgatgcgatcaactggaagaaagggtatcagtgatggaagatgaaatgaatgaaatgaagcgagaagggaagtttagagaaaaaagaataaaaagaaatgagcaaagcctccaagaaatatgggactatatgaaaagaccaaatctaggtctgattggtgtacctgaaagtgatgaggagaatggaaccaagttggaaaacactctgcaggatattatccaggagaacttccccaatctagcaaggcaggccaacgttcagattcaggaaatacagagaacgccacaaagatactcctcgagaagagcaactccaagacacataattgtcagattcaccaaagttgaaatgaaggaaaaaatgttaagggcagccagagagaaaggtcgggttaccctcaaagggaagcccatcagactaacagcggatctctcggcagaaaccctacaagccagaagagagtgggggctaatattcaacattcttaaagaaaagaattttcaacccagaatttcatatcaggccaaactgagcttcataagtgaaggagaaataaaatactttacagacaagcaaatgctgacagattttgtcaccaccaggcctgccctaaaagagctcctgaaggaagcgctaaacatggaaaggaacaaccagtaccagccactgcaaaatcatgccaaaatgtaaagaccatcgagactaggaagaaactgcatcaactaacgagcaaaatcaccagctaacatcatgatgacagaatcaaattcacacataacaatattaactttaaatgtaaatggactaaatgctccaattaaaagacacagactggcaaattggataaagagtcaagatccatcagtgtgctgtattcaggaaacccatctcacgtgcagagacacacataggctcaaaataaaaggatggaggaagatctaccaagccaatggaaaacaaaaaaggcaggggttgcaatcctagtctctgataaaacagactttaagccaacaaagatcaaaagagacaaagaaggtcattacataatggtaaagggatcaattcaacaagaagagctaactatcctaaatatatatgcacccaatacaggagcacccagattcataaagcaagtcctgagtgacctacaaagagacttagactcccacacattaataatgggagactttaacaccccactgtcaacattagacagatcaacgagacagaaagtcaacaaggatacccaggaattgaactcagctctgcaccaagcggacctaatagacatctacagaactcaccaccccaaatcaacagaatatacatttttttcagcaccacaccacacctattccaaaattgaccacatagttggaagtaaagctctcctcagcaaatgtaaaagaacagaaattataacaaactatctctcagaccacagtgcaatcaaactagaactcaggattaagaatcccactcaaaaccactcaactacatggaaactgaacaacctgctcctgaatgactactgggtacataacgaaatgaaggcagaaataaagatgttctttgaaaccaacgagaacaaagacacaacataccagaatctctgggatgcattcaaagcagtgtgtagagggaaatttatagcactaaatgcccacaagagaaagcaggaaagatccaaaattgacaccctaacatcacaattaaaagaactagaaaagcaagagcaaacacattcaaaagctagcagaaggcaagaaataacaaaaatcagagcagaactgaaggaaatagagacacaaaaaacccttcaaaagatcagtgaatccaggagctggttttttgaaaggatcaacaaaattgatagaccgctagcaagactaataaagaaaaaaagagagaagaaccaaatagacacaataaaaaatgataaaggggatatcaccaccgatcccacagaaatacaaactaccatcagagaatactacaaacacctctacgcaaataaactagaaaatctagaagaaatggataaattcctcgacacatacactctcccaagactaaaccaggaagaagttgaatctctgaatagaccaataacaggagctgaaattgtggcaataatcaatagtttaccaaccaaaaagagtcaaggaccagatggattcacagccgaattctaccagaggtacaaggaggaactggtaccattccttctgaaactattccaatcaatagaaaaagagggaatcctccctaactcattttatgaggccagcatcattctgataccaaagccgggcagagacacaaccaaaaaagagaattttagaccaatatcctcgatgaacatcgatgcaaaaatcctcaataaaatactggcaaaccgaatccagcagcacatcaaaaagcttatccaccatgatcaagtgggcttcatccctgggatgcaaggctggttcaatatacgcaaatcaataaatgtaatccagcatataaacagagccaaagacaaaaaccacatgattatcccaatagatgcaggaaaagcctttgacaaaattcaacaacccttcatgctaaaaactctcaataaattaggtattgatgggacgtatttcaaaataataagagctatctatgacaaacccacagccaatatcatactgaatgggcaaaaactggaagcattccctttgaaaactggcacaagacagggatgccctctctcaccactcctattcaacatagtgttggaagttctggccagggcaattagacaggagaaggaaataaacggtattcaattaggaacagaggaagtcaaattgtccctgtttggagacgacatgattgtatatctagaaaaccccatcgtctcagcccaaaatatccttaagctgataagcaacttcagcaaagtctcaggatacaaaatcaatgtacaaaaatcacaagcattcttatacaccaacaacagacaaacagagagccaaatcaagagtgaactcccattcacaattgcttcaaagagaataaaagacctaggaatccaacttacaagggatgtgaaggacctcttcaaggagaactacaaaccactgctcaaggaaataaaagaggatacaaacaaatggaagaacattccatgctcatgggtaggaagaatcaatatcgtgaaaatggccatactgcccaaggtaatttacagattcaatgccatccccatcaagctaccaatgcctttcttcacagaattggaaaaaactactttaaagttcatatggaaccaaaaaagagcccgcattgccaagtcaatcctaagccaaaagaacaaagctggaggaatcacactacctgacttcaaactatactacaaggctacagtaaccaaaacagcatggtactggtacctaaacagagatatagatcaatggaacagaacagagccctcagaaataacgccgcatacctacaactatctgatctttgacaaacctgagaaaaacaacaatggggaaaggattccctatttaataaatggtgctgggaaaactggctagccatatgtaggaagctgaaactggatcccttccttacaccttatacaaaaatcaattcaagatggattaaagacttaaacgttagacctaaaaccataaaaaccctagaagaaaacctaggcattaccattcaggacataggcatgggcaaggacttcatgtccaaaacaccaaaagcaacggcaacaaaagacaaaattgacaaatgggatctaattaaactaaagagcttctgcacagcaaaagaaactaccatcagagtgaacaggcaacctacaaaatgggagaaaatgttcgcaacctactcatctgacaaagggctaatatccagaatctacaatgaactcaaacaaatttacaagaaaaaaacaaacaaccccattaaaaagtgggcgaaggtcatcaacagagacttctcaaaagaagacatttatgcagccaaaaaacacatgaaaaaatgctcatcatcactggccatcagagaaatgcaaatcaaaaccactatgagataccatctcacaccagttagaatggcaatcattaaaaagtcaggaaacaacaggtgctggagaggatgtggagaaatagcaacacttttacactgttggtgggactgtaaactggttcaaccattgtggaagtcagtgtggcgattcctcagggatctagaactagaaataccatttgacccagccatcccattactgggtatatacccaaatgactataaatcatgctgctataaagacacatgcacacgtatttttattatggcattattcacaatagcaaagacttggaaccaacccaaatgtccaacaatgatagactggattaagaaaatgtggcacatatacaccatggaatactatgcagccataaaaaatgatgagttcatgtcctttgtagggacatggatgaaactggaaatcatcattctcagtaaactattgcaagaacaaaaaaccaaacaccgcatattctcactcataggtgggaattgaacaatgagatcacatggacacaggaaggggaatatgacactctggggactgtggtggggtggggggaggggggaaggatagcattgggagatatacctaatgctagatgacgagttagtgggtgcagcgcaccagcatggcacatgtatacatatgtaactaacctgcacaatgtgcacatgtaccctaaaacttaaagtataataaaaaaaagaaaaagaaaaaaaaataaagcccttcaagtgctacaaaaaaaaaaagaaagaaaaatcatgtgctcaactaaattggacatagttgttcatgtttgtattctatgaacatctagaaaacaagtacttaccatatgtagatatacacacacatatgtttttgggaagaaaaatcttgaaatggattggttaaaataaagacacagacttttaaagatcactgtaactcagatttgcagtatgaacatttaactatttcattgacaatgataaagatttttgccacccttctttttgtaaaccattgcatcaagaatcacaacagtgtttcatttaaaagcaacctaaggtaggaaagagcgctgagtgtgtctctagattctaattatgatttattacaagaaacattttaacaattcttatttaacaaattccagaatatctgactctccttaaactttaatataaaagtatcagttttttttgttttgggagtacttctttaaaatcaattatttactgtatatctttataattatagcaaatgtaattaggatataatactgtgttgggattattttgccaactttgttaaatgacttatttacagaaaatctgacatcttctttgcctctattttaagtttgacatcgagtggttagaattttgaggaagtttgatcaatgatgaaatgatagcttggtagggcatgctaacctaactgtttaaaaaatgtctcttcataatttataatgacaagcacttaggttttatttaactacactaatgtattctatttaagtatgtctaagtacttatagcttacctatatccatagtattaatacaggctcatgtctaagagtaatttgtaactctaaccttatataatgttttagtttcattatttctagtgattctgaattactgctgtattttctcatgcacatgataattagatgagcttctatcaaagcatgttcttgtttaattattactactgctttattaaggaatattattgtttttcccaccttcatttcatatcttcatagtccatggttatatattttttattccaataactgacagaatatgtaataatttaagttttattcagccagattatagagatgaagaaaaggatttgcaaattagtttgattttatctttgttcaatctcctatctactgtttgtattatatatttctttttgttgaatacagttaagtttatctttaatcaggactgacaatctttttcagtccaaacctcttgaatagctaggagtaaagacttgacaaacttcaactaagtaatattatggtaagagtcccttaactgtcacaccttaccttagtggaaatgagttaactaacttaacaccaaagaacagttgtagaagaataagcaatgtaggagagaatactgcttgcagtattggatttaagggaatttccaagatctctattattcactggcacatggcgaggaaatctgtttaaatcagttgtttccagttggttcttcagagtagatggtgtttatcattatcaaggctctgatatatcgaatattaatgacagataaaaaagagaatctcaatcattgagtatgtctgcaaaaagagctagctccaatttaaaagggtattaattttcatagagaggtaatattttttctgtggtattccccatgcttaatgtactttctaaacttggatgtacttggatagaaatctgttgttttaaattgaatattcctctgttcacccttatatttcattgaaaacaatattcagtgatatcatcagtaaaacaataggtatgaaataggtggcttctttgtttaataaatatgatttttaggaatctgacaaagaactaatgagttgttttactataaaagttatgttgatatgcataaaaatagaaaaaaattccagatttttagagaagaaaaaatatcttaaagatagtttaggaaaatgtaaatgaatataatctaaaatatttgtgtatttgtcattttaaaaatataaataattgaggtaacttcaggataaaaatgtcactatgatgtgtcattatatatttttcttctgaatcacatgatttatatagaagtttatctgcagaatatgagattcatcttgtgttatctgaatgactttttatctgtacaccccaaagactatttcatgatatcttattttgttaaataattgctagttttccaaaagtatataagtttcaaaagtgaatttaaaatttcaagaagactcatagcctgcaagtctgattttatattttcattctttgttgcttattaaaactacagttgcattaatgactgttgaggactttgagaagagttagtctcccaattgttgaaaggctagtggtctgctcttcttttttcccttaactgttcaattctcagatattgaccagtggaataaggtaattgaacaactaggaacaccatgtccagaattcatgaagaaattgcaacccacagtaagaaactatgtggagaatcggcccaagtatgcgggactcaccttccccaaactcttcccagattccctcttcccagcggactccgagcacaataaactcaaaggtatgcccttcaggaatgacttgaggacaactatgagggtgacgggccaaacaagcacacagtatagagacctctatctctttctctttgttcccttttatttttagttgacacatgataatcgtacatttttgtgggatatagggtggtatttttgaaacatgtatagaggtataatggtcaaatcagagcaattagcataacccatcacctaaaacattgatcaattctttaattggcacagcctcaagttaaagaaatatttcttcaaagatcgttcctacaaaggggagtagccacggattttagaattgtctggatattcagggccgggggcggtggctcaagtctgtaacctcagcactttggaaggcggaggcgggaggatcaagaggtcaggaaatcgagacagaccatcctggccaacatggtgaaactgcgtctctcctaaaaatataaaaaaattagctgggcatggtggcacacacctctagtcccagctactcaggaggctgaggcaggagagtcgcttgaacctaggaggaagaggttgcagtgagccgagatcgggcaactgcattccagcctagagatagagtgagcaagactccgtctcaaaaaatagatatatattatacttcataatgtaattccaattttcttgagtttactttttaaatcaatttgaatctctgcaattatgtttgtaaatgataaactagtttgcatatttgattattgaatttaatttttaatataaaattggcaaattataaataatcttaatatacaaataaccaaagagaagaatgtattctactgtgtttggaaaagagcataacacatttgctttcaaatgaaagaatgaaagataaagcattgaaacattttcccatattgtttcctaaaaatagtattgtttcttagcaagatgattttgtattggtgtagttcatgaccctattcatgaagaatccattgtaaccccagccctttctttttttttttttttttttttttgagacagagtctcgctctgtcgcccgggataccgatctaggctcactgcaagctccgtctcccaggttcactccattctcctgcctcaacctcccgagtagctgggactacaggcgcccgccaccacgcccagctaatttttgtatttttagtagagatggggtttcaccgtggtagccaggatcgtctcgacctcctgacttcgtggtctgcctgcctcggccttccaaagtgctgggattgcaggtgtcagccacgaccacgcccggctaaccccagccctttctaagagcagaaaaatggatagatttgatgagagaatcttatgagaatggtacatgaatttggatgtaaaatcagttacaaattaaagaggtctttaaagcaatgaataaataaacacagccctgttaggctattaggaggccattggcaatgagaaaaattaaatattgaattaatgtataagtatttctgtatttttgttattcctgtgcggtacagagttttaatttgaaagtaatgataatcagtttctaggattgagtttcccagaaaaatgattaatagaaataaaaaattctcaagtttaactagtgatttttcatatttgttcagaaaattaaaagatatatttattgatgtaattaccaagaaaatacttacaggtaaaaaattaattgctacattttaactatagtatggttaatattacgtgaaaaatacatgaacggcactagaaaaaatatgccaataatcacagtcattgcctctagctagtggggttagatattatttcctgatttttgtattttatataattttcaaatttgtagaattagccaagttgttttaatctgaaaaattgattaaataaaaattgatatgtatccagagtcatctatgttgattttttgaaaaatccatttaaattttgttatctttaatttgatgttttaccatatagttagaataaactgaatattttcacggttcaactttcagatcagttgagtaacaatattgatttgagatattcatttctgttaaaactttatgtaaaagactaggggagggatagctttaggagaaatacctaatgtagatgacaggttggtgggtgcagcaaaccactatggcatgtgtatacctatgtaacaaacctgcatgttgtgcacatgtatcccagaacttaaagtataataatttaaaaaatttacatatttttagaggttaaaattaatgtgtcttttaacaatcttactaaataaatagctatcaccatataattttataactgttactgcccacaaccataaaattaattatgataacctttacataatatagagtttctcattagtgtctggtgtagcattagactggcttcagtctttaactactggatttcatcaagtcatgattccattgattaaaaatacctgatgattacagaatgttaaaataaaattcagtagttgaatgatattatttctatcacttcaattctttgattgtttttatgtatataagaaatttgtggctgggagcagtggctcactcctttaatcccagcattttgggaggctgaggtgggaggatctttgagcccagagttcgagaccagcttgggcaatgtagggagatcttatctttacaaaaaaaaagaaagaaagaaaaaatagccaggcatggtggtgcatgcctgtagttccagttactcgggaagctgggatgggaggatcctttgagcgcaggagttccaggctgcagtgagctgtgatcattccactacactccagcctggcaacagagggataccctgtctcaaaaataaataaataaataaataaacaaaaacaaaaagaaaagaaaaatttgtatgatacaaactcttaagtcaatttatatactaaaattctgataattccgttgtataaataagaatatagagacacacgtgttgattaacttcaaacagccgtccacacatttgttgaacatcatgcatttgcactctgtgctctttattctgtttatcctatattcatgcaggttaccaaagaagatgactttgcttacataaactctccaggttgatacattttactaagaagtttgcgtgaataattatatacccaaagtgttacaacccttggagagcctcagaatgaagccttaggcttagagacacaaagaaacaggtgtaaaatgcattttcttttccatcacatcaagggatttacctgatgtttggaaggaagatactattccatactttgttttcttaaatttcctctctgacaaatttccttactgaaatcaaaatcttactaattgtttttctcatttattgtttcagccagccaagccagggacttgttgtcaaagatgctagtgattgacccagcaaaaagaatatcagtggacgacgccttacagcatccctacatcaacgtctggtatgacccagccgaagtggaggcggtaagaaataggctgcctttactttgcttccacaaacaaatcatagctcatagcaaaaactgaataggactagaagcctaaagaatgcacaatggatttttataaaatttctaagtccaaagcctattatctgcccctctaaaagctattttcttcaacatatgttttaaatacatttttttcaggacttactagaagagggtatgatttagtcctacaaaccttagatgtccatgatacactaccatttgtttctgttaaattgccaatacttgtgtttcttcttgtgtgtttgactgccagtctcttctaatgcaaacttagtggtaggaaacaacagaggacaagttgcttagcttgtattttttttttgaaaagatacctgccactagtaaaatgtgatacttaagaatatttcaattagaaagcttttataagatgattaaaacgattggtggctttgtgaaaccttgcatgaactagatgaactagaagtgggtatttcagtaagtacattacttcaggttgatcagtatgatgtatctccatgtctgatacccagacatggagaatcttctcagaagcataactctttctattttaaaaatatttttcaaccatttactatcttctgttcaacctctttctttcatctttacctctctcctttcctctgtatggatccagggctgagcagggcaaggggggcttgctgttgcccatgtgtgttctataggcctcctgatgagaatttcctttctgcactgcctttaaatgtttctatcaggaatgttaccttctcccttaaacatgagaagcttctcaaattcttagagtacctgtgctaaagcatctcatatttttttacataataccttccaatccatttgtttggatttgttcttaatctttcatttgaaatactgtttgtttccccaaagtattcttaaagatattttcactttctttcagttttctttcctctgcttcaccatgtgtttttccatgtcagaggtgctagattcaaacacataattctcatttcttcattcttcactagagaagatacgaaagaaagtgagaactaggtagaattgaactttacagacacaatattaaacaggtccttttcataatgtaacccaatctttaagcatttaaaaacttcagagaaaacacttaagtgattaatgaatctcccaagtgtgaagactgcactacattttgtttaagatctgctctcttagttttacaatgatgttgagatttcatgttgcctcaagttaatttttagtcattttatttgattcttaccaaataatatccctacaattaaatatttctgagtttaattataatgttctaaaaattaatatatattcttacaaccaaaatatagaacctcttccagtctcccacacttgggaaatacttgcacagatgttcttgggatggaatgaagtagtgaagtaagtgagagaaagtatgatgtatatgtttacaaaaattaagtataaaaattttatctctgatgaaattcaagaaaatattttaggttatgttgataaacattttatataaatatgtattatctgaaattgtttctcctcatttattttgaggcatattaacttatgcctcactatgtggcatatttattttttcttatatctaacttaatatgtataatctgtttttaatgcattgtggcctagagtttaattagagtcataaagtctgcatttgtaattcacttttaattatgttgcctataaaagagatagttgcttggaatctataacatcttactgaatagtatcaatgagtttttaaatttattttaactttttatgaaaaacttctttgtagaatgaaaagataaaatttaggatactaaaatagctggagcctttttcttaaccactttgatattggtcatgctggggcacggatagtaacaaggcaggatgtatgaattttaggggaaggatctgatagagcctgcagttccagaaaaagaagacagttaatgcacagaacaagcaagtacttgacatctagactcagatcattgattatacaagggtaaacatgtcttacatctagacatgttgtagtgaagagatgggaatcatgatcccagggcaagaacaatttattactctatgaagtgcattacagtggtcacaactaagaagagaaagatcctgaaggtgctagaatcagtagtcagctatgctttctgcaatatccttagaattcatgtctctgttattgcatatgaacatgtgtttaacataagataacctttctctatggacacatggcaaagctataatatagtgatatatcttctgccggggctgacaagactgttttgcaaaatatacccccgtatgtctttataatccaaataaatggaagtatcaaataattgggatttttattctgatcaaagagctttcaagtaactcacatgctgttagggagggaaggaaattcaaagatgagagagaagaaaaataagtttcattggatggaaataatggcaagtggataggggataaagaacaaactatgataaggtgatatttagaggaaaagtcaaaagagtatagatatgctatgtgtgctaagctattagttatactacgagctatcttatcatgtttcccaaactaccaaagtacaaaaatcaagagagaagagcatatgaatgaatgttgtcataattctgagagggaaaattagtcatgtacacatgagttagaaaattttaaaaattggatgccaagctcaagagtaatccatctgtgtagtaatagtacataaatattttgaaataactgctcaaattattagcaacttcttattcaaataatgtttagagtaacaaagtgtgatttcaaagtagaacacacaaatcgtgtataatgtcaatgctttttcatgaaacaaatagaagatgctctaactctggttcagtattcatcaagagggcaaatatattacacacaaatgtaattggttgacttatttgcatcttcataggtatgaaagatgagttaggtttaaatttctgctcttcccattactaatttgctttgatcaagttgcttaacctttctgcaactcagttttctaaactaagaaagttctcctttcttatcatatgtacagcatagcattctgagattttgaaaagttaaagtgcttagcaaatgcttgggagtcagtaagaatcatgtaaattattcttacccttataatacttataattactattactattatgacttttacatgcatagctttactatcttttgatatttgaaaaagatatatgcgtctggtgaaaaagactagctggccaggaaattgcagaaatattccacaacatttcttttttgaacaatgatgacaatgatctatttcccacatgattttaggtccatttttttcattttcttttgtttaatgtatacctacctcttctttgccaggtagaagaaaatctagtgtcattagtttaaaccaaaataaagacacattatagattccacaaatcttgattatcagtaggagatttttgggattttggggggaactcagtttaatatcttccttgtgccctgttggaagaaaatacaatgttcatgaagctttgttgccttatctcttaccacattactgagtttaggcaccctgctaggatccagtggtggctttaccactgagagtggagctacagataagccttaaggagcatctgggtgaactccaagctaaggaagagttgattaactatttctcagggcacagaagaagaggaacataagctgtaactattttttttaaatagctttatttctgccagaaatttcagagcacttcaagaaagctcctgagtgcaacggccttacaaaaggctccattttgtagttcttgttccttgcaagggcatagggagagggagcaggagagggagatgtgagttcagccaaaaccaagtacatcaaaactcaaataaatcatcatgaagaagcctagtacaaacatatggagtcagagaacacttcatgattcctcaattcttgactaaaaggaaggagctagacctgagattagaaccatcccctaagatgggacaggcgttgaggccaagcttcatggccagtggtgatcaaccagatagaccattgtgttgaaggctgtgtttcagagatgcccagagacagttcttaatggctgaaaccttactctgggaatcagggcagagaggcaggtagagctgcttgggcagctggcattttggaattcttttctctagtaggtgaacctggggtacttgagaacccagaggacagctggcaggaaacatagggccttctgtgtggcagccaaatgaaagttccagaagagaatgctggaaatgaggcctggaaattgtactccagctataatgtagaccacagagagagagcgggcatgttttgtttgggaatctaaggacacacgacatcctccactagactaagagaaaaggtgtaactaattcaaccaatttggctggaaggtgatttggtaaacagggccagtgctgagcttgcttgttattttttcacctaactcaagattaatttgggaattgggacagggttgggtgggaatttaatctaccgatacagatcctgaattaaacaacatgatcttcagattcccagggagagtataacctgggaaacagagtaacagttacatgtattagtgctgaagttcaattaaaataaacacttaagaaacatgagcccagaatagtcaacactattacacatttactgtttgtttataatgtaaagtgattaagagggtcttaaatgcttaattattattatttactagttcactactttagggattatgttatttttgcctacggtgaaagaatttatagaaacaagttaacctggctatattaagctattttattacaaggccatcatagattccatgccctgtgagcagagttactatctgacattattttatccatcttcttgtctgccattatatcttactggatattaccaaagaggatgcatggaagggatgaccaatcatgtgggaaatatactttatttttaatcttcttgtgacacaaatatgtaaactttgatattgtgtatgcctattatgcctaaaatctattcaaggtaaatctgaagtgggaacttagagataattatagagtggttttgtcctgcagttcagcaaacatcagcattcagagtagcaacttttcaactttgagcagctataggaccagcaaccatgatgaagtgaatggaatagagctagatgggatcagaagaaagagagaagggaatcagaagcctgtggtcaaagtagaacaggttccagagcttgatctgggcattccagagagacagctgatgcagatatgtaggccaagcagtcaagaccagctgggtagtcaggagagacatgtggtctaagatcagagatctaagtagatgagaccctaaggggtatttaaaggtgtcagagataaggatgttctcatattgcaatgcagaagtcaaaagcagacactcttggaccaacacagagataagcaaaaatgggaagccactaccaacctgagagctagggggcgatttactggagcccaggtagtaatggcctgtccaatgggagctagagtcactaacacaggtaagatacagctgcttctagagaaaagggtggggagaaatggcctagattctcccctctgtctcctggtgatatctccctcctattggctgagaccaaccctaaggcaactgacagacaaatctgggaaatatggcctaatagagtccagccccctgagaaaaagagcaactaaagaaagggggaggacagcatctgtgggcaaatgtgtccagggctggcacttaccaggtcattctttccttattcacaattctgaaatccctaagtaaaggagaagtaaccagggaacggagcacaattcctctggagaggagaagactttagatgttagaagaggtactcaaggacctcccctagtaaagtgaagtaagcatccccctaataattatttaatttcttcaagtatttcatgatttcttgccaagacatcgcaagtactataccaacctgatagtcttggcagaagcgtatttctcattggggtttccactgaatgtgcacttccttccttttatgtgttgatgtcactctttcgattgttggttgtagggctacagtcttgttgagacaatgttggaccacatgtacgtaaggggagtgaaaggattcagccatctgttttcttttaggttgctgtaaatctactcttctgctgccataggaaagacctctttcactaggaaagaacttttcactttcctctcactcacctcttttttatttcttccttttttatctcttcttcacttcttacccttttctcttttttatccaacagagttattcacataagctttgactatttgttaacagtttagtatttattcacttattctataaatattgactgaacccacactttgtgttccacactgacctagatgatagtgattcagcattgaatttttaaacaaaaaatgaaaaaaaaacaggtccctgcttttattgttcttggtaggtttctaatagttaatagcaatttctattgaatgagaatctttgataacttatcatctcctgaagaaacaaaataaactcctccaaatatgaattatctaccttacttgattatttaacttgtttggtgtatggtttcctgactgtagaatctgaaatcctatgtcccttgaaatgttaatcagttataactaaactgcagtgagaatctgctaatcttcaaccagatgtgcatcaactgctttgaatcataattaacaagttatgcttatccacttttagctatgatttttaaactattatttgactgaatataaaataatgtcctgctgggcacagtggctcacacctgtaatcccagcactttgggatgccaaggcgggtggatcacttgatatcaggagtttgggcctggccaacacggcaaaaccccatctctactaaaaatacaaaaattagccacctgtagtgccaggtactgggaaggctgaggcaggagaatcgcttgaacccgggagacagaagttgcagtgagccgagatcgcaccactgcactccagcctgggagacagagtgagaccgtcttaaaaaaaataaataaaataaaataaaataaaataaaataaataaacaaaaaagtcctgaccaagctgactaagtttggttacccaaatgcatagattattactgaaaaccaaagaatcctaaagttgctatactaaacataaaagtatacaatctttaaactataaattaaatctttctatttactatagcaactaaataaaaatatttaatttatattttaaagattcatgtattaatttattgaccatctgaagcctttgagcatagttcacatgactgaggatgatgggaaggagttattctcattccttattatcactgacttttaattctctcaaatacatttttactgtaaaagctaatatcatttgattatgaatatcctgtgttacttgctctattaaatctactccatgaatgagttcttgtttgcattgtttctacctttattaactgtggcttaaccagttgtcttttactgaattctcttgaatccataataaattcctgaaacaacatggtgaagaatagacttataaatatatttgattataactagaagcaatgtactttgttagactcagtatatatgaatttaggaatgataaggaaaaatatgagctacaatgaatatgaatttgatgcatctaatgttcaaatagttcatcagtagatatctactgtttggagataaaccattgaataaaatatgcataagtttgcttcaaatattttataatccttttattaaattggttagtttgagtgtagcactgtgagttaaacctgaagtatctggaagacatgatttaagtgagttataaatgcaaacagctctctatacagactgtatctcccgttgggaggaaaggggattaaagtctttgtgagtcacattttcctttgatgagtgatatcaaaaggttagggcatgtcctcaagacaatttctgaataactaatccatctgaaattctgaaactacagtttttgtttcctgattttccccacagggtacagtaatgtacttaaaatagttaataggcattatttttgtttgctgtcatttgatttgtctgagaaggaagtcagtttgcaagtgaagtttattatataaaatttaatagcaactctcaagtggcagaaaatacctatcaaatatttaaataagcataaactgcaaaacttgagttacttaaggattttttttggtagaaatttgaaaatttttattaagaaggaaaaacttcatttcactaaaataataagaaagctcttttaaaaaaacatttcatgggtagaaaaagcctctgttgctttttattaatagaaaagatctgcagtgcctatcacactgaatatgaccttggattttactgctagtttatttcttgatgctatatatgtgtgcacagttttagtaagtttccccatttttacttgtttagattttttttgaaacatgcttattactttggatttcaacttggaaagcttataaatgaaacatactattatacttgataaagcacatcaattgagttttctcaggaaagacctatttggaggtttttataaagggcttattctcaaaaagatttctgaggtcatttctagcattttaggaatatcaaacaaaaattttatctaagttcccctaaatattttcacaagtaagacaaactactgtatcctagaatgaggaaaagaataattaacaatgtgaataatttcaagtatctgtaatgtttagcatgttagtgattttatttccataatatgttttagtatttcttgtatattttaaacttgacaattagtccaagtatttcccaagtgcccatcaccagtttggtctataatctgtgtgcaggtcactggtgaccttttgtttcctggaagtagaaaaacaaagaggtaactcagtgatattgtactgtgagacatcatgattctcttttctccattctaaaactgccatcatttaaattctgtttttcgaccagatgtccttatgaattcttttaaatatgatttgttctactcacatggagttaataaactggctgaattcctccctcagctgttctctccatctgtcctgccacaaggactacctctttgagtctttggatttcttattattgccgcatgtgtcatgctgtgaaaaagctagtgtgacccatggcaggcttaatttgagaaatagtttagtaccatctatctgtcatagaagactctttcagtgtggagttgaactctaagtaggtttgttagactcagaatatatataaatttagaaatgaggaggaagaaatatgagctacaatggatatgaatctgatgcactctaattatgtgcttaattatagaaagagcaattcgtattttgtggttttcatttgcttggggaaagttaaatcaatgtctgtaattccatttgtggagttctaaatttccatctgttcatgctgatgtattctttcagcagcaaaatatgagcagtttactaattgccttccagagaaaatatagcttcattagattttgcttgcccagtgcctcagctgcttaacgtgaagctatcgtttgaattgccttcggattgttttgatgccatgtattatgttggtgggagcttgtcaaaatgtttgttgtagatagagttagccacctgcttttaggagcctcactccctatatgacttataataggaatatgtatttcactgaaaatatgtaactcatttatctctaattttagcaagttctattcctgaagagaaaggttcatcttaattttaattcattgggatattcagaatccactgaatccaagattctcaggtgtgaaaagctggaatggttgaattgttcattcttaggagagacatgttttgttgtctagtagaatccatgctttggtttttgttttcatgttttatcttgaacactttagaccatgagtgctattaatcttttgaatggatcactgagagagaatactttatgaaaagggggaagggaacagaaattatttttctaaaacatttcatgcctgttgctctctgaaaggctgaggtatggctaaggtattctgtcaggttcttccaaatacttgattttatttcttctctcctaggtgatatctgagatattgtgagatctacctatttatcttgaggtagtgggcatttgtgagagtgtattttattttcttaatatgtttcatcctggaaaaaaagagattatccaacgtgtcatctgcataggatgtaatccataaactgtgggagaaaaaaatatatatttttcttttttaggattccttctatgaaataagcaaagaagtcagggtgggaacttgtgagatgttctgttaactaaaatttaccaaattttatactaagaggaagaataaaaaagagaaaagaataggagtatgtcagaagacagaatctctgtcagacagctttgcctcgagataagtagaggctacaaaattggggaatctctaggaagcataactcttttggtaatttgcattcctgccttgtttgcttacctgtaatgttgctaaaacaatcaaactagacttgaatttttgtccatcatcaaagaatctcctcttaaccactgtgtatacatgttcaaggagagctctaaggcactcctacccatcctcatatcattgtgttttcagtaaagagcatttatcaataaagaaaatgatatgctctgcagaggtaatattgttttctgcaaggcctggatgttaattattatacataaactctgtaatttaaaggccacatcagttctgtacccagcagaattatttggtgagcagccctgcttaagttcctaaaggtttactttaagtagtaggtttgctatttgccagatttttctttgctcctttgctctcaaaatcaatgaggtttaattgcatgatgaacttttaaatactacattcttctttttaaaaaaaaaataccctccaggcacagtggctcaggcctgtaatcctagcactttgggaggccaaggcgggtggatcacttgaactcaggagtttgagaccagcctgggcagcatagcgaaatcccgtctctactaaagatacaaaaattagccaggcatggtggcttacactagctacttgggaggctgtggtgggagaatggcttaaacctgggaggcggagtttgcagtgaaccaagattgcaccacagcactccagcctaggtgacagaggaagactctatctcaaacaacagcaacaacaacacccgagtatatacatacttatcctccatgattcaacgtaacaaatgtttatagcacccctatgaatgctgaaactgtaccagatctagagatgcacacaggagggcatttctctgctcttaggagctcactacccagcactgagctttcctatgacccctaagggttccttagaggaacttctgggggcttttgaaaaacatcccaaaattttctatcaataattatgtatttacatctttctggacatccagttcacaggctttttcagatcttcggagttcctttactccaaatttaattcttaaaattttgaaaatcatgagtctagtaaagaaagttttcagtggatggggggaggggactgcaaaaatgctgataagttactcttagactagattatcatttatagacataacaaaaagatttaatacacgttttaggaaataatttattgtcttcgggtaattttaaaatttgtattaaaatgctctttcatctgtaaaagtcctactttttttaaggaaagtggtggaggcagaagtaactgataaatgtaaaatattatgctttcaatttttattattgtgatttaaaaaaactattaacattataaaaacagtttcttgtggtccctgacaattttaaaatggtatttttttttcaagaaatagaaattaatagccactgtctactcttcaagtagctagttcttttcttatgctgtgaggctttcaggggttcctcatactttgtttccactttgtttttcggaagcactcacttcctttgcgatatttattttcctctgccatgtttgtctccaaagatttttgtttgtttctttgtccatgatctaagaaggtggttatgttgtgcattgcaacaaaaagttgagacgatcaaatgaacaacaacaaaaacacacagaaaattaaccaaacatcttgtttgagaagtcatgcttagagctggtgatgctatcaatattaggaagtaaactaagaagtttgacagtctagcagagaaaggaaaataatcagaaagtgtaatcattaatgatgctgaaaatgaatatgtgtggtgatgtgaagacaactttaaacgctgtaggatgtttatgctgacatttaaaaatccctaaatgaaagctatagacatgaagtcggaatgtcatcacaactctacatagaccacaagtctggaagttgcagagctgcaaaagaaccagaaaaaggataggcagaaactattcctgggtgctaaatcatggtaaccttcagattcagggaaaaggctgaatctcaacattttcttcccaagtgtagatccatgacttaggccctagggcattcgttatatgtgaggagaaggtagaatagatgagacagaatattgaaaaggttacactccctttttacaagtctattaaaagtttatggtctttccaggagtatgtgctataataaaattattatgtccctttctaatggtagggcaattgtaagaatgataaaagccacttccataacttgctgcaggtttcatatgagactcagagggttgtttgtagaataatgacccacaatatattgtgaaagagaatataatgtatgtaaaacaacatgagttcaatcaacaatcaaaagatgctccccacagtttctaattccaagaagaatctgatttctatctttaggtgcattttgaaagctgaattccttcgatgttcctctgtaaaaagtgagagataaattagctaaccctcaagcactttttctgaaaatttcttacctaaggtatgtgttgtttttgactaagttagcgtaaagaacttttggtgactttctttcaggacatatatgccagaatgctgttttcatagtacagcaatctgttaccacttctttttctgaggtaggcctgctcatgcctcttgcaccattcctgtttaatcatgaacaatagtttattcctagccagaattcttacatgcatagtcacaggtaggttttcttaagtaatgaatagctcccccaagaatggaaggctaagctcaaatccaggcaaaaaacttggcttgcaattagttaatttaaaatattgccttacttagtctagctttcccaaagcaaaggactgtagacagacaatgggaggaggaccaagagttacagagtgtggagaccaaggtcatggcactgggagacagtagagcacagtggaaaccactgtgggtcaacaattagaggacatggactcaaagtctcatcataccttggacaggtccaccacattcattcacttaaacttttgttaagcttcaagtgtacgctgccattgaagattgactaattctaatgataaaaagacatagtttctgttatttagtagtttgtagtagagttaatatgtaagtaagtaagatactataaccatagtactagtgccatagaaacacaaaggaataaggcataactcatcctatagcagacataggaggtttttaggaggaagaaaagcctcaaatgggaccaaaaggatgggcaagagttaccaagtgaaatggaggtggaagagtagaatctggtaggcaaaggaagcagcctgctcaatggccaggagagaagatgaaccaggacacacctggggaactatgagttaattcactgtgagcagggaagggaatggtgagaaatgcagctggaaatgtaagcagggtcctggtcaggaaacaccttttaagtcattcccagagggtacccaagctgcaggcttgggggaacagattttaatcagggagtaacacaatgggattcgtgttttaggtagatcattctttctgactgatgaagtgataaaatagtagaaagatgatttaggaagctagtgaagtagttgaaataaaagatgacaaaatggacttcaatggcaatggagatgaagaaagaatgacattcagagatggtggtataattgcatcactaatctttacccatgaaatgtcctgtctaataatgttttaaaggaaaaaaatgtgaaagtacccaattaactttgaaaacataggatgttattaaagaaggttttcttaaagcttatggaggtaattgaactattttaaactgaacagttttagtctatgtgacataagaaaaatggaaatgttatcagttcctatcatgttaacacaaaagctcagttagacttattttcttttaaaattactccttggagtaattacttaatgaaaaggcaagctctgttttaagaaaatccactatgagatatatttattaaatacattaaaaagtattatataataatgtatataatacattaaaaagtaggagcaatggtaacgccttattattagaatatagttctttatgactgtatttgtttctcaaacttttttgttccccaacatacctgagagacagtcatcaactcattaacgttatcaactcatcaatctatattaaagcaatgattcttcatgtggggtatggcagattcttgtgggcatgttaattaattggaaataaatcctcactctcaagtgattctgttccccatctccctctcctcagagcaccactttctttctgataaacatctcatatgtaaatgtggtacacaaatgctttcttatataatgcaacaaatatattgaatccatgtaggtagaaggggcggtttttactagattagcagaagtctttatgcttgattgaaagacttcattaacctagaacctttatgtcacattctaaactttttcacagagattagtggtatgaaggggaaaaataaatatttgtaacaaaaagtatgtatattttaaaattaatagacactttggaattaaaaaaattattacatttcaacctaaaatataatattatccctctaacattagtgaagtatactcaaatcaattttccttaataatgtttctaattctgtagctatgtttcttcattcactgtggatttgtatcctggggctattcattgatgctaactggaagagtgtggttttctgtggtctccaggatgactccttattgattcatgttacttatgtaggagggctgaagatcctctttcccttgttcatttgcttttgttttgtgactgtagggcaaaagtgcaaatgacatgtggctttaatagactaactcagcaatatctgtgttcgatgtgtttttcacctagagctattttctagttcatttttagctcatatttgtcctacagaatatccttggggctaatgtgatcttttacctatgaaaagaaaggcttgcaacaaaagctactgcttctcagaattttaagttaactcattttctttagaaccttccatatgccattatcatattgtgcattatgctgcagtgattcatttttatgtctatcttccacaactctactgctgtaaagttccttgggagcagaaattcagttttatctaccgagtgcagagaaaacagtgagagtaatggcaggtgcatagtgtatggtcagtaaatgccctttgaattgaactcagctgtactctgctgagcacttctctagtgtttataaaaccctttctgatatccaatcttatttaagcctcataaaaactctagaaaatgatgactatcctcaacaactcttaactgaacttactttctaaatataccttgactcagatcacttctcatcctttcatctatgcaaacatcatttctaccctggaccatgtaatattctgggacttatctctcagcaccactcttgtcccttgtggtccattctgcagaatgcctagaattttccttttaaaatgtaaaacacgttacattcacataattcctcagctaacaccttcccatcttccaatggcttcttatcatatttataacaaaactcaaagtacttatcatggcttgcaaggccctaccacagtgttgtttcaaattttatcataacccatagtaagaagggtgttttacattgcaacccagcatgcgtgtacaagtgcacgtgcgtgcacacacacacgtacacacacacaaaagaaaaaccatacactgatattttctatctcattttactcttcttagttacactaaaaggtgctagtgatgacaccaatttgttttcatgactgcagtttggaaaacatggctctacttagtctggctcctgcctacttttctgatatcacctttaggcttcccttttccactctgcaccagtatatggcatccttgcggtttccttaccacaccaagcaagctccccctttagggtctttgcattgtatttccttctgcctgggacattcttcctccagatattcacattgctccctcctttacttcattcaaatctctgctcaaatgttaccttctcaaagaagccttttatgaccatcctttctaaaatagtactcttcggccgcccccttgcccgtcatgtaacacacattcgtgtgtaacctggcactaaaacataagtagatgacctgcttctgggtcagggtttcatatgtagcagaggggatccttgctgtgatctattgaaagtcagcccttggtacaagtgtttgtaaaaataatactaataatagtttaaaaagtaaaacaaaaacaaaaagaaaaaaactaaaaagaaaaaatagaatagtactctgttacactctagcctcttaatcttttttctctatgtgtcactgtttgacattatatatctctttttattatctgtctcatcaactagaatttaagatgcgtaaaaagagagacagtgactctttggggcactgctgtatcccaactacctagaacactgtctggcccttagtagtcatataatcaatatttgctgaatgaatgtatctgtgtttagaattgaagacactaaagctcaggatgttaatggatgttaagcacattgcccatgattgtgtggctaatatgtgtatatcaaaagctggaatctactttttaaaaattatttgagtaatgtcagacatgtcataatttatttcatctctttacctgaccaatttttccgagttaatatatcgtagatttttgaatgcaaataattgttcttcatcaatggttcatacttgttggatatctactatgtactatatactgtgcttccatttcttctagattttcaattgtatatctagaaaaccccattgtctcagcccaaaatctcaaaataataacagctatttatgacaaacccatagcaaatatcatactgaatgggcagaagctggaaacattccctttgaaaaccagcacaagacaaggatgccctctctcaccactcctattcaacatagtattggaagttctggccagggcagtcaggcaagagaaagaaataaagcgtattcaaataggaagacaggaagtcaaattgtccctgtttgcagatgacatgattgcatatttagaaaaccccatcatctcagtccaaaatctccttaagctgataagcaacttcagcaaagtctcaggatacaaaatcaatgtacaaaaatcacaagcattcttatacacgaataacagacaaatagagagcagtggtttgtagttctccttgaagaggtccttcacatcccttgtaagttggattcctaggtcttttattctcaattctttgtcccatggtctagtgagaagataaataagtaaatgttgatgatacgtattccaaattttaagcttattgtacattggaaacacataaaaataacccagtaatgtgggttacagaaggctgcttggagtgattaattttcaaacaggaacatgaagggctaaaaaagaaattatccaagtgaagaaaggcaagcagaagaaagggtatatgcaaaaatcccagggtcaagagagggtggagagaattgcaaagctttaagctttctgagtgacttaatggagaagggtgagaaattattttgggctggtaagcagggaccagataaggaaggagttcccaagcattgtcatgtaccatgcatgctatcctagggtgaagggaagccattcactaggaagtggggcaatagcattagcagatttgaagtttcaaagggccactgtctgcagtgtgggactggagttgagaaaagggagctagaaggcaggaggatagatctgtagtaatctaaatcactgtagacatgggcagaatattcaagagatgtttagaagctaataattgacatgaattgtaaataattaaatttggaatttaagggaggtggaattcaaagatgagtaatatcatatggtagagggttaataaatatgtgttaaatgaacgaatgaagaaagaaagattcctgaccaaggcactgggtgattggtggtgcaattactgaaacttttcagttaaagaaccatagaaaattttaatttccaaggagcaggaaagagaaatttcattttcaagacatgattacactttttgatggtgtagagctaataaataaatctgagaaaactacagaacagaatgaaaaatagagaaaactgaattcaacttctttgccaaaccactggagcattatgtaattaagctttctaattacactcagttcagatcataattaaaatttgcattactagctttcaaaggttcctctggtcacctaatgctatgatgtctctaagcaacattagtgctttccatttataacacattataattccatgcttttcgcattgcaagtacttaagaaagttttgttgaattacctggtatgatatttgttgaacatttggaactagtttctcttgaataaagcagtagatgaaaatctttcattgcaaactgagtgacttgctcaaggtcactcatcttactagtgccagagtcaatggtgcttcagtgctctttccattgttcctttcagaaaacctgtgacgcattatgaggctcagagattctccctgctcactttagtctacggactgcatttgattatgagacacaaatcttgtgtccactttgattacaattcacaaatttctttgtcctgttctttaaaatcatagtatatgatatatctgtccagaaatcattgtattctaccaagaactagatgccattaaagattgagagaaaatcacctactttctctagaatgttttcttttgcgtctatacaaatgaaacataactaggcaaatgacaagacttgcttctctactgtataagtggttagagcagaggtcttaatctttgctgcatgttagaatcatttgggaagtttaaaaatatcctgacaccaaggcctcaccccagaacaattaaatcagaatctctgaggtgggatctaggcagcagtatttttaaaactcccagatgatttcaatgtgcagccgtagctgaaccataaactagagcaatttaattgaaaatgataaatatgcacacaaagcacctcttaatgttttcattttttcttgccacaaggtggcagcatcacaatatattgcacattctcgcccctctgagtggacgtggaaatttgtatctagaatcctgattaacagcatttcaagagccccgtcagctagagataaagtcgcctttttccctgctgttctctgttgctttgtttgcctaataaaacgttaaaatatatttcaataggttgaattagtaggaactataagcctggggtggaaaaatgcaaagaacacagacattgtattcagttagatttgggtttaaatatggcctctgctactaactcatagatttttaaatctttgtgtgcctcagttgcatacttggaataggaggtttgtcacaaagactaaatgagataatatatgaaaatccactttctacgaatggtagtagaatgatgaagatgttgagaagaaaacatgataatgctgtgatggagtcatttacacaagatccaggaaaacccaggacactgtactcttttatttatagcctttgttttctgcatgtgggtctcttccttctctgtgtgtgtcctatgtttcagtttccagtggcaattacttcttacaaataaacatgttctagtctctttcatttcaaagaacaaagaatcaaagcaaacctttatttttaactacacttctacctttagcaatggaagtatgacttatagctttatagccaagtctctataaaacattagtccttgtttactcacaattactccagttcactttttaaacattgacactgctttctctaaattcaccagtggcctcttaggtgccaagtccaaaaaaatgggtatctcatgtatttgcccatttgaataagctgacaacaccttcctttctgcacccctgcatgttaatttctgtggtggcagcacacctgttctcctgcagcctccattgctcaatgtgggttgttctctcttcccttagaattgtgcatctcagaaattttttctttatagcccttatttcttttctctctgggagtcttatcttccaccacagccttaattttaattatcataaatggctcaattctacacatcgtcccatagagctggcctgagttccagatgtataaatctaacagtcactggaattgaaattggcattgcaaaatcaacatattaaatattaaactggccatatctcctctctacaccaaatctatgcttcctccttccaattcatggcactactttctatccaggttttcatctggataatgagataccttggagtcttttctttctattccctcagcccccttcacatccaaggtgactggaaaatttaatcaatttgcattcaaggtaattattaataggtaaggacttaatactgccatttagctcattgttttctggttgttttgtaggttctttgttcatttcttcccctctttttttgtcttttttttctgataaaataattttctctggtggtatgctttgattccctactttgtatcttttttgtctctaccataaatttttactttgtggttaccatgagaattacaaaaacatcttatagttataacaagctactttaagctgataacaactttttgcttgcatttttaaaaaactatacttttactccaccattcctcccacatttaaaatttttgatgtcacaattaacatatttttatattgtgtatcccttaacacttttttttaaaattttactttaagttctgggatacatgtgcagaacgtgcaggtttgttacataggtaaatatgtgccatggtggtttgctgcacctatcaacccagcttctaggttttaagcccagcatgcattaggtatggtcctaatgctctcccttcccttgcccccaaccctctgacaggtcctggtgtgtgatgttctcctccctgtgtccatgtgttctcattgttcaactctcacttatgagtgagaacacgcagtgtttggttttttgttcctgtgctagttgttagtttgctgaggatgatggcttctagcttcatccatatccctgcaaaggacatgaactcattcttttttattgctgcatagtattccaaggtgtatatgtgccacattttctttatccagtctatcattgatgggcatttgggttggttccaagtatttgctattgtatatagtgctgcaataaacatatgtgtgcatgtgtctttagaacagaataatttagaatccttcggatatatacccagtaatgggattgccgggtcaaatggtatttctggttctagatctttgaggaatcactacattgtcttccacaattgctgaactaatttacactcccagcaacagtgtaaaagcgttcctgtttctccacagcctcgccagcatctgttgtttcctttttaataatcaccattgtaactggcatgagatggtatctcactgtggttttgatttgcacttctccaatgaccagtgatgatgagctttttttcacatgtttgttggccacataaatgtcttcttttgagaagtgtctgttcatgtccttcgcccactttttgatggggttgtttgtttttttcttgtaaatttggtagattctggatattagacctttgtcaaatgagtagattgcaaaaattttctccctttctgtaggttgcctgttcagtctgatgatagtttcttttgctgtgcagaagctctttagtttaattagatcccaattgtcaatttttcttttgttgcaattgcttttggtgttttagtaatgaggtctttgcccatgcctatgtcctgaatggtattgcctaggttttcttctagggtttttatggttttgggttttacatttaagtctttaatcgatcttgagttaatttttgtataaggtgtaaggaacgagtctggtttcagttttctgcatatggctaggcagttttcccagcatcatttattaaatagggaatcttttccccattgcttgtttttgtcaggtttgtcgaagatcaggtggttgtagatgccttaacacattattgtagctattgttattcttagtagtttttttcttttcaccttcatggtaaagatataggtgaattacataccaccattacagtattagggtgttgtgagtttgactgtgtacttatctttgtaagtgagttttacactttcacatgtttttgtgtcactaattagaatgcttttcttttagcctgaagaactctcttaagcatcttcttgtgagacaggtctggtggtgaactccctcaacttttgttgtggaaagactttatctctccttttctgaaggacaactttgtggggtacagtattcctaattgatagtttttttattttattttaacattttgattatgttgtcccatacactcctggcctgtaaggtttctgccgaaaaatctgctagcttgataggaacattcccttaaatgttatttgcttcttttctcttggtgcctttaggatcctttctttgtctttgatttttgttgatttcattatgatatatcttggtgtaatcttgtttgaattgaatctgattagagaactttaactttcctctacgtgaatatgtctttcccaagatatgaaaacatttctgttattatttccttaaacatacttcctacccctttgtctttctcttcttgaactaaaaaatgtgctcttttgatgctctcccataaatcacataaactttctctatttgttttcattttttctcttctgaccatatatttttaaataacttgtcttcaaggctacaaattctttcttctccttcatcaatcctactattgcatttttcattcattcattatattcggcaataggatttctctttgtctttgaaaaataatttcaatctctctattaaatttgttttatttattgttttcttgattttatgaaattgtttccctgtaatttttttgaagtttgttgagcttccttaaaacaattattttgacttttttgtctcttagtttatatatttccacttctcttgactcagccactgggagatttttgtatttttttggtggtttatgtcacctcagcttttcatgtttcttatttccttacactgatgtctgtgcatctgaagaagtaagggcttattccagtctttgcagactggctttgtctgggaaaactctttatcagtcagcctttccatagaacctgtgcatgccatttggtgtcgtctaagggtaggcctgctgttggagtcctcaggtaggttggctgggcttggtgtctgggtgcctgggtcagcaggtgggtgggtctatagggttgggcctaagtctagatccacaagtgtggacctattgattgagtccccatggataggcctgaaacctgggtacacaagggcagacctgacgcctatgtctgcaaatatttgcctacatctgtagaggctggccttatccttgggtccacagggggctacttggctctgggattggctttgagtctgagtctgcaggaaatagtcagttactgggatggatctgatgtccaggattataggggacagcccagtgctggagaagttccagaggctgggctgctaaggtagacctggcagtagagtggcccagagaccaagtctgctgtatagaccttgagtctaaggctataagcccctgatcagtgctgggaaaggtgtggaagctcagtccacaagtactagcctggtgtctagggctgtgagggtctctttggtgctgggtttttctgtggcaggcccagtgttggggtctaaggcaaagtctgatgctcacttccttctcctaccatcatgtggagggtatctgtctccatgctgtgctgtctggtaattgggggaaaagtgaagcaggtaatgtgaaactgtccttcctctctctccagtgcatcttttcttgtttccgtgctatacccaggtgctgaaatctctcacctggtttccttcacttttgtgaaggtatttttgtgtgcggatagttgttcaaattgatgtttctgtgagagagggagcactggagagccttattttatcatcttgctgacatctcctcaaatcatacttttaaaaggcatttatttaatctgtagtagtatattatttaatttctgtttgagaacacagacatagttcctgaaacttgctgaagcaatttttaataatcaacggatagtacatcacaaaatgccatatatctacattcagaaggcaatgaagtttttggtaattggaaaccaggtcattgcttaatgcatagtaaggtcacattactgagaaatcataggaattaattatatctaatcaattcttttgataattgtgcatattgcaataatattttcattattttggcgattgttggtaagactatttgtgaaacaaatactgagctccattttggggtaatgaactgctgttggtgccacagagaatataaggctttagagaaaaattggacatgctaaactgtgccattagccaaataaaacaataaaagtgcatatcattttgtgcttcatcagagtcattttaccaaaatttttattttctaattaattggtgaaaatttaacaagtcctagtcatcaaattaagaaaaaaaaaattagaaaactctatgtgtagagattcaaggaaatataaaatcaaaatgttgtatatttccttaatggatttcctgttctatctaattttgtactaagatatacccttcttgcttaaagcgttttaataaagcatgcatcttttgacaatcatctaactgccaagcttaataagaaaaaacaaagcatatttcagtaagatataatatcatttactttgatccagatgttgaattaataatgagtgcacacactgagatacagtgctatttaaagcttttgttgacattttaaacaaggcagcagaacacagggagatccttaattaggacaaagcagacaaacaccaacaacttgatggactgtcatatggttcagagcataagtgttagggaaaaatgtcagttcagggctcaaagaagaatcaaaggaacaactttgtacaacttagatttctcatatctggtttttatctctttagagattcatgtgtttagaggtctttgatgtccatgatactttgacaaaaaagtgtttaagaatgtaagtgttgactgcttgtatgatagttgccagctctagctgtaagtgtagactgacagaaaattggaacagaaatcagtgtgtggcaggcacaaatttgtctttaatgaatatcttttacaggtgtcaaattatccagtttaatgtttcttcaaccataagaattccattattctgtcttttcccataagagaccataaatgtattcatctgtcactaattaactctgtgattgtgggcaaatcacttatgctttctcagtttctatattctcatttgaaaattgaataagggtggcattagataatctctgaactttcttttaccactaatatcctataatgctgttgaaaaagatacttcccatgtatctttgaaaattatctcaaagattcagtaaaaaataaattcacacattttactcaatgaatattacttatatatatgggataaaatgaatgaagtcacaagaaagggcaacttttttttttttttagacggagtctcgctcagtcacccaggctggaatgcagtggtgtgatcttggctcactgcaagctccacctcccaagtttatgccattctcctgcctcagcctcccgagtagctgggaacacaggcacctgccacaatgcccggctaattttttatacttttagtagagatggggtttcactgtgttagccaggatggtctcgatctcctgacctcgtgatctgcccacctcggcctcccaaaggcctgggattacaggcagaaagagcaacttttaccttcgaaagctcaattaggaattgaacaggtacttgttaaagagatcgctttagtagaaagtcatggccaacagcaagaactccatagaatgcccacagaatccatatttttcaactatagatttattatgcagaattctactcttgtctgtactgtctgccaacagccatattttatagctgaattttacgtttctaaaaatagagaaaatggaaggaaatgctgacgtgctgtctcagagaaggaaaaggtacagctgcaattgttgaaacctcagtggtagaaaaacattgcaattcagttgttttctttgtcctcaaattactgtataccttagatctctaacatgccatgtcacaacattgctatgtagagtgtccacatatttattctccaaaccacaacacttaaaggagcgaagggcgtaagtgctactaataattacaaggacaataagcataaaatggaactattttgtacaaactgggaaatatggtcaccctattggcttatgtttctatttcttgttttacaaagatgttcactttaaatattgttttattagtctttattttagattcaacagtattgacacttgctctggattactctttaaattgggttttaataaaagtttcatcattaattagctatatgacttcatgatatattttttaaaatttccttgaatcttagtttcctgactgtgaggattattaaggtctatataaagacagcttaacatatggtggtttctcagaaaaaaagtgacttcctttaactagatagagaacagtgtttttttttttatcaagttctcagagacttgagagagtagatctgagatcattatagtttttctagtgtcacaattgttctatggtttctttccttttaattatattggtgttgaggatctttttctacattttattcaattgtttaggtgatgtctcatattaacgtcctccaccgaagatctatctggatctttctgggggtgatagcaatttaaagtttggaaagctttcaaagggttcagaggcatgctttctatcatgcctttctggtgccctgcgagtcaaaatcctcatgtgcttcatttgcaagaaatggccaattactagctttttgtgaaattctacttgcttgacttctataacattgcaatattctcatttttcatgtatttctttagctattctcttttgccttagtgaacttaccttcctctgtccaatctttaaattttaatttggccatttactctctatacccacatatcttccctgggtgacctcatccactgtcatagtttcaacaaacatcacttgctgttagtctcaaatctatacacatctctagccaacagcattcctctgaacttcagattatatacttaactttcaaatcatcatctcttctcacataacacttaggctcacctctaccaatctcatttccccttttccattctctatttctttagatggcttcaccaacacgatcatcttcccaggtactcagcttagaaattggggactcatattcttctctcccatcacatatgttcaatcaaaaaccaacttctaccaagtttatttattaacatttattaattattcctgaatctgtgtctttcgttcaccctcatctttttttttttttaaccgcagtcagaactttcaatatttttttatagatcgtgcaatggctccctacctcttctctctgcttacagttacatctttcttcaatccagctgtaaatttcactgttccgttctcttacattcctcagtggtttctcttcttctttcttccgtatcatgataccctggatcatttttttttttttttttttttttttgagacagagtctcactctatcacccaggctggagtgcagtggcacaatctgggctcactgcaacctccacctcccgggttcaagcgattctcctgcctcagcctcccgagtagctgggattacaggtgcctgccaccatgcccggctaatttttgtatttttagtagaggtggggtttcaccatgttggccaggctggtcttgaactcctgacttcaaataatccacccacctcggcctcccagagttctgggattacaggcatgagccacagcgcctggccccctggatcatccttgatccaccctttgtctgacccttctgcttctctaagtacagctcttatatcttgtcacttctgacgacatgttttattttactgtgacaaaattccttcttgttttcttggcatgcatgtacacacagagaaacacatgcaccaccactaccactaccaccaccaccaccaccacccctattctgttttctacatactgtaacttggcttataatgtgctcttggcatggagtcacttttttcctccttcttttatcttgacaacctcccacacatctttcgctcactgaataagcatcactttactccaggaaatcaaatctaggctttgttaggacttctccaccctgttcccttagaccatatacaggtttctatcatttatcatgttgtatactaatgatctgttttgcatcagtcttaccccagtaaattgtgaactccttgtggtcagcagtcaccttattcaattttgaaatctcagttttttatatagtctgccatgtgttaggtgcccaagacctttactgaatgaatacatttaataaagaaataaataaattctagtatttattaattcacagtgaccatgtacttgtttgtgtttttttcctcatttaattgaaacaatttggacatgtttcatcagtataaaattcatataattgaccaccaatataaattcatatgaaattaaccatcaataaaaatgtgtctaatccattttaagttattgtttatgcaatccatataaatttgtgtttgaatttctgcaataatttcaaccaaggaagttcaaatcttccaaaataatatgaaagaagtttacagtcttttgaaaaaatattcaaagggtgaaagtcacaggccctgataactgttcatatactatctttaatgtcctcttatccttcatttctcacatctcaattactcttatctgctaaactctcctaaaatactctctcaacagacacctctggggcatttttctttatccccactcctcatttattttttatttagattgtcacttagcaaaagaataattcctattaaataagatagggaaagagcacaagcgagtgctcaaataccaacttctccttagcggaaggaggcagggaatgttttgaactatctcatcctgatgattgctgcccagcacttatacgtgtgtgttgtaacattgctctctctggattattggtcaattattcttttatattgtcacatagaagacatctgtatgtgaatgtgccctttcactggaggtgacattcgcatttcctcttcaaaaaacaaacaatcaaaaatctgaatatgtagtaaatttgcagaggccgtcgaacaaatactataaatcaagtggtttaaagcagccctcttggtttgttgaaaggaaaaatcttgaactcagcactttgcattctctcttgtagtttgtttgtgattagtgtctatgtactttgtgctttatatatcagcaacagctgtacactgaggctcctagggaaacctcctgaaaatagctttgttgcaaaaagaaaatggcatttatgaactttggcaggaactgtactcttgagccatgttcaattttaaaacttgaatggaaaaatccactgcatggagaagccagccaggcaggatcatgagctggatctattgttagaagaagaaggaggtgccaacagctcagagggctctgggggctctgagagcttatgtacactgtgtcctgcaggggtcctggacaaggtcgcttggatagcggcctaaccacagcattatacatgctcaggaagaggcaaagccggaaatttaccacttggcaaagcgtctttacaaaaccagagtttggctttgtggtagcttccttaggtaatggtttcacaatttttcaaaaataacttcattttactcattcactcactaagtcagaatgtttctattatttgagagtcctttatagaggtggaaggttctacctcagtcaggtcctgagagcagtgcctgactatcccagtcctgtcaccttatatacgttcaatgtgttgtgttcttactattgtctggggtggtgtgagagtctcattttgcttagttgtcagtgctgacggctgctgagagctgctcagccagccacatctgaattgcagtaggtgaggtttacagccttctgccccagtatcagtcaaacgtgctaaaagaatgtctggctccgtgagtagttatttctcaatacttcagtattatgctaagttacttcaccacagccaggcaaagtcttctattttcatagccagatactttgcaggatgtgaggccccagcatgccagggctaggatgaatatttgtgtctgtcatgattcaagctaccacagattctgcatgaattagagaagggtcactttagcccgagggtgctgttcatgagccaaaaagctctcacagaagccagaagctgtctctgaaaatcttgtccagagctttccttactataatagccatttttgaaaggtctgtgtcctaaaggggttgcatcactcttattgagtgactcttttagtttttcacaaaaactattgcttttggagtattggacggggtagcaaaaacttgatagctcttctttgcgcttaaaccggtgccagccagtgtagcccctcagcctcctctttctctacctcatggtgatttatttttccaagagccttttttttttctttccatatcacttggcctgaattggagctaccctagccgccatggtagatctcccaaagcctaaatatcaggaagaagaggtcagagaatttatttgagattccactttccagtaggcacgcaggtttgtgaaaatccctccttttccacatttgaactccacatgggaagagaaatgctggctctataagtcagactgaaggccctattgcatcatttctgctagagaggactaaccaagggccattcagggattcaaggtgacctacctctacagtcatggcagcttctgcaggttaaaacaaataaacaaacaaaccaaaaagcttaaaatcgtttaagtatagggcacacagcaatatataaagacattctatggtatttcatgaaaaataaaaaggttgatttgatctcaattttttttatattgaggactagtactatggtctgttgagaaatataaacttttctttagggaaggtctaaaaatagaacaaaatcttattagcctagaagaattttagcatggttctgttataaggcaagtgaatgaaggaaaagtagcttctgggccattgtaatcaagtgttttgtctgttttttaaaagaccagtcattaattgcttaggcgtgggttctaaatcagaagatgtcggaaagtgagctctcgggatttgcgttctgctgcaaatattgcagcaatattgggtcagcagcaaatattgcaatatgaatgaatcctccataagtttacaggaaaattttaacttctgaactactgtaatttcctcataacttatatacggttgaaatcaccgaaataaatgagggcaaggtattctcgtgcattgtaagagtttagttatgtttacattatcacacaaagattattttttgtttttattcggcagcctccacctcagatatatgacaagcagttggatgaaagagaacacacaattgaagaatggaaaggtaagtctactacttaaaaaagtatactttttattttattgaactcagaaagtatcaacaaggcttttccttgtaaaacaatttactaaaaaatgatttgctgactgctattctcttagaccatttttaaagctcctaaaacttcatctgtcttttcatgccgaaagcaatgtcacatttgctcaagaatgaaaggcatttaccattgataccttttaaaatggtactgattgtcagtgtttgtcgataccttttaaaatggtactgattgtcagtgtttgtcatggtggggggcaagctttagttcagaattccagaatacaactttctatgtttgtacataaaatcatcatatgaagcatgaaattaaaattaattctgagatggttttagactttagaaaataaaagatagtcaatatatgagtttactcattggattgataagacttgagaatttacatagaaaatatgtgtatctgagtagcctattaatctaatctactaatctaaatcactacagaatagaataaatatgagaaagtcaaatgcagattgtagcaaatgatcagatcaaaatgggaagagctgaagggaaggaacatttgagctaccttgcaggaattaataagtgtaaattaggaaaagaaaaaatattaagaaaatatcagataaaggactaagaggaaaacaaaggacaggaataagcagaaaatgttataaagatactaaacagggccaggagcgatgactcacacctgtaatcccagcagtttgggaggctgaggctgggggatcacttgagcccgggagttcagaaccaacctgggcaacatagggagaccctgtctctgctagaaacatacaaaaattagccgggcatagtggtacacacctgtagtcccagctacttgggaggctgaggtgggaggatcacttgagtccaggaagttgaggctgcggtgagccatgattgtgccattgtactcaagcctgggtgacagagaaagtctctgcctctctctatatatatatgtaaaataaaaaataaaataaaaaaattttaaaagatactaaagagattccactggtccagagattccagggtcatgttggtgaatatggaaaaatgaacatatacaaaaagtggatcaagtgaaaaaagatgcttgatatagatgaaaaagagttgctttgatccaagtaaggacaggaaggcactccttaggggctcatgaataggtgggtgataggatataaccatcatttgaggaggacatggactaaattgtgagaaattggagaaagaagtacatgtaaaggatgatgattatacagattataagccattgcaaagcaagaatgagtagggcggaatgatttttagctaaagggacagagtaaacagaactgaaactatccaatttaactctagcattcagaaagccaaaaatggatgccagtctgagagtaaatgaactaaattttttaatgtgtttggtttttggcaagtttagatttacaagtccaagatatgagtctggaaaaaaaaaaagatgcagtaagagatggaagttgtaaggattggtaataatttaaagtcatgagaatgtgtgcatttcataggaaataagtataaagaaaaatggatgttcaaagccataaaaattgttgctagattgagctagaatgtattagtacttcccccaaagaattcagaaaacaagtaaaacatgtattacttgtttcatttatgtagaaatatttcatgcatgtagaaataaatgttatttatgtagaaatgtatgtagaaataaatactatgtatatggaaataaatagtatgtttcatgtacgtagaaataaattttcatgcattgatttcttcaactgctttactagatacctatttgtgccaggctctctgctaattacaaggcaatatagaaatagaaatagagcagtaaaggaatctcaattgatttttaatttactcaaccccatcaaaacgtaattatttggcattaagtaatgaatttccctgtggatgaaggataaatttgttttctataataacacagctgtttcttacagaacttatctacaaggaagtaatgaattcagaagaaaagactaaaaatggtgtagtaaaaggacagccttctccttcaggtactcactctccgtgaataaccaataaactagtacttgtgtaatttcttggcctttgtgtaggggttgcaagaaataacataacattgcttaaagagcagatggacaaatatcacatggttgtgtccttataatgattttagttttatttcttttgatattcagtgtggcattcattctgattattctgatggtaatgatccagtacaaaaactttttcataaataattttaatagtaatgaatcctgaagaaaatgttaacatgggctaaagggtaaatgtgcctcatcaaaattcagagccataatgcccttttgaccatcaagtcaatgtggagctcagtaatcctttcagccgctacctcttccctcattcattcttagtgtttgaactcttctcaaggttgatgtgacaatagttgaaacatctaccaagatgggctccggttaaggtcagcttggaaaatttttcgtttgctagccacagaatctaatacacaattgtgcatatatattttttactgatcctagtaatgtgctttagtatgacttgagacaatttacttattaatgctaatatattttttcctaagacctatgctctcactataaagagttttagaaaatgtgatggtttattttcagctttaaaaactacattcaactcctgctagcaaaaatgggggctacaaatgcctagttttgagaaaaactgattagggtgttgttttcctaaattattttaggaaaaaagatgtagaatgaaataattaatcaattattcatatcgatactactcttcgaataactaatttacaccccaaaccactatgatacccaaacagatgcaattcggttatgacatgcttttctcaccagtagacttgaaaaaatactcagttttatcccaagtttttcccttcctcaaagaaggttaagggaatcacaggagttgttttccataccaccctctctactcattcaccctcgcatacagattgacacagtccacagaagctgcttcaaactaatccacgtttggcctgttgctcattaaaaaacttgaagacagaatccaaaagcctcaagatgccacctgctaaggcagaatgactccttgttttaagaattcctataatgaccagaacatattgtcatgtactcattaagcagcagaaataacagaatgtagccacgggtaacctagcatgttaggctgggcctggacaaattttagtagaacctattctattcatcttcagttcaagttatcattacttcatttccttttcataccaccttatcccaaaagactttttatatcttcccaaataataggatctttcctttctataggtcctactagtccctgtatgttaaatatttgacctcttgtcttattatcccgtattgattgtaatttcattgagaagactgtatgcatttatctttgtgtcccatgtagtgcctgggtgctgtgccttgcacatagtagtagctcagtaaatatatattaatttgaaaattgccactcaatttctccctcagcatatttcttagtactattccaaacacaaaattcaagacaagatcatgtaactttaatacagtatactattcagcatgttcttacaccattattataaatatttattcactctattaatctccatgaagataaacaggccaagcataaagtatataaattcttgctattggcattttttcatgcttcacataaaggtttgcagctttcaggtgtttgatttattcattttgggaaatatatattcatggatgttttgcaggcctgcttagtgtgttaatgattaattctaaaatatgcaacttaggctctacctgagtgagaaggctaagccactttttaaccattccaactaccttaacaattaaaaattatctatgtaatacatatgccctaaactatagttgactggcttaaccaatttatagttaaaatgattgtggattaaatctaggaaaaatattcatgacttagttataagtcatgtagtatgactttctctttcgtgagaaatcatatgtatgctacacattatgggatgcatttctgtatgacatatttatgtgcatgatggagaggctctagggcagccatgtgctggcgctgactctaccagctcatgacggccaactctgtacctctcttcccaactatgcatttattgttggtgtgttggcaacgtgaaatcaggcacgaaggatttacaacatggaaattggcagaccctacaaatcagggcgtttttgttgccccctgcagagccaattgttaaatttttattggcgcaccactgtgtgtatgcgtttttgtgtgtataataaactatgctggaaagaaaaagcaattctaaaaaaaagtttgaaaagtcagcttttttgcattgttcattatattcagctttttttcattaatgttcacgtagcatattttattttgaaaatagctgtggtatttttataacacacactctgttagtattcagttatggcaatactgggaattctgcagcaagggagtaagttaatgcagtatctcaggggccaagtacttctaatacgaaacccatgttatgcgatgcttttaaaatgtaaataggaagttaaatgtgcatttgcagaataatttataggtttgaaatttattgatgaaattgttgtatgtcaataagagataaatctaaacttcagatacatttccaaataaataattgtattcccttctgctatctgatttcacttgcatagtaatttattttcaaggatggcatagctgcttgcttcctgaattgatctgtaacaattgctgagggactagcagtccatgaattgaaattaattttcttctaaaagcatttgttatagtacgttagaactagaaaaaatacaggagagcatctgattcaccaattctgagtttgttcaccagccctcttccacctgagaagtaaagctcccaaaactaacagtgactcactaagataaggatgctgaacaacaggatgggcagagatttttcaaaatctctaaatcaaagataaagcttctgggtgattttaatatgcaaccattctctccccagtgaggaccacattccccaccatgggaatatgtcttagggtcactaatatagtccattaattttatttactttttattaaaaaatctcaggcccagacaaattgtggctcaagatcatgtagataaaaaagacactattttttcattcttgtgctttttctaattctgtgtctaccatatttttttgttgttgttgggattgggggttatcaggaaaatcattgcctttaaaaaaagcagaacaacattttcccccataacaatgttttttggttgaataacttgtagctgagaaattttctttagcatatgttacttctttctatgaaatctgattttttaggtaaagttgaaggtagctaatattcctcatttgcaaccctattgacattttcagttccttttaatgccatttttatagacaaaaatttgtaatgctttattgatggcaaaacatttttgaaaatgtgtatctctactgttttctcttaaataatatagaaagaagagatatttctcacattgactggacaactgaacacaatgatcatattcaattcagttcaattctgtttaagagattttcgcaaactgcttggcagtaatttaacaacttaaagccaaggcccatgtcttgtcccttacgtttgtgtttgggtttatggtttagaactcctgtttattgcctacatgaaaatagacttgaatggatcatccagcagaagtggctgcaggcaaggaggcatttattatagcgcaatagagggagtcatacagaagcaaatagttttcatctaatagtggtggactggttaacatttaacaactatatttaaaaaaagaattgactagtagcacttaacaattcctgtggtataaatattctcactgtgaccaattttaagcaacaatgtaacatcaatggatgcagagttggaaagagatgctaataattcgttctaagaagccactaaaagccagctccaggacaccatagacagtgcacggttctctcccaccatcacactggatagcaaggaaccattcccatgaaacaagcagatgtcatgggaacttttacaaaggaagcactgaagacttctcttaatgaatttgtgccatataaaatcagaagcaatagtctatggatccctagaaatacagctgataaagactttgatagattttgaactttgagtagttgaacactaattatatttgcattcaacattgataaactagagggcaggaccattccaacacagaggataggaattagagagaagctgctgatgaacaaaaggagaagaaagacaactgcaacaaagtgatttcctttggccaaaaatagcttaacagtttcactagttggaaagcaggaaggaacttgcttttcctcacagaacctatctagaagagtacacataagatactcaatactgttttgttaactcgaatacttactctgtgctactactcagcagtagacattgtggaagacaggagaaatgaagtataatgaaagcagtaaaaagaagcaggggaaatatatgcttgaggtaatccataacaaaactacatataataaggggctgactggtatggcataacactcggaatattccagaagtgtgctgaaaatatgctgattttgaaaataagtgcagtaggagtgctgtgtgttttataagcatagcctgcagcacgatcctgtttatgaagagcttattaaaagctactttggcttttgttacatacattcaatattatttgtagatataaatttgtgttttggagaaatttcttcaatgctctttgtttaatttctctagctgccattgttgtgggtttgtgtttatttgtaaacatcaaattgttttactataagggagccttatttcagctaagacttatctcacccttatttgaatcattactcaactttaattgtgacaataagaatgtgtctacataatcaactccagccaggataggggaaaaagcctatctcaagagaagaccaagattattattaaagacttaaaaatactttttggtttgtattatgccacaattttattttaaaactttttaaagttttaaaactggttattttctcataaaaccagttatttttaaaactggttattttctcataaataaagcatgctatcataatcgcctggttccactggctttctagttaattacaacattcattttatatatatatatatatatatatatatatatatatatattcatttgatctgtttttaacatccaatccactgacactgaaacttcttattcaaataagtcctcagtataattgtatttctacacattagcaatgaacataaaacaattccatttagaatagcatcaagaaatacatatttaggaataaagttagcaaaagaagtacaagttttgtactctgaaaactacgaaacattgttgaaagaaattaaagaggatctaataactggaaaaacatttcattgctcatggattagaatatttaatattgtcaagaaatgacagatactccccgaattgatgtacagattaagccaatacttatcaaaatcatagctgtcttttttgcagaaattgacaagccccatcttaaaatttgtgtggaaatgcaaaggatacagaatatccaaaataaccttgaaaaacaacacagctgggaaatttacatgttctgatttcaaaacttactacaaagctacaatattcaagacagagtgctatttgcatgaagatacacaaatagatcaacggaatcaaattgagagtccaggaataaatacctacatttatgatcaattgatttctgataaggatgtaagacatggacaaagaatagccttttcaatatatggtgctgggatgattggatatatacatgcaaaagaatgaaggtgggcccctgcctcatatcatatacaaaaatgaactaaaaatgaatcatagacttaagtataaggtctaacattataaaactcttaggcaaaaacataggagtaagtttttataatcttggattagaaaatggtttattagatatgacactaaaacacaagtgataaaagaaacaacagataaatgctatttcataaaaattaaaaatatgtgtgcttcaaaagacaccttcaagaaaatgaaaagataaaccatagcatagaggaaaaacatttgaaaatacatatctcattaagtaacttgtacccagattatataaagagctcttacaggcctgtcacagtggctcatgcctgtagacccagcattttgggaggcagaaatcggaagatcacttgaggccaggagtttgagaccagcttgggcaacatggcaagctcctgtctctacaaaaaatcttttttttaattagccaggtgtggtggtatgtgcctgtagtcctagctacttgggaggctggggcaggagaattgcctgagccctggagttagaggatacagtgaaacatgactatgccactgtgctacaggctgggcgactgagaccctgtccttaaaaaaagaaataaagaagaaagaaagcaagaaagaaaggaagaaagagctaaagagcttacaactcaataataaaaagaaaataaagcaattaaaaaatggccaaaggagctgagtaaactttctccaaagaagatatactaatggctgacaagcacatgaaaaaatatactcaacattattagctatcaggcaaatgcaaatcaaaccacaatgagataccatttcatgcacactaggatggctagataaaaagacagataataagtgttggtgaggatgtagagaaattggaatcctcatatactgctggtagtaatgtaaaatggtgcacccactttagaaaacagttttgagaggtgagagcgtgctggcagtcctcagagccctcgcttgctctcggcacctcccctgcctgggctcctactttggcggcatttgaggagcctttcagccccccactgcactgtgggagcccctttctgggctggccaaggctggagcccactccctcagcttgcagggaggtgtggagggagaggcacgagcgggaacccgggccgcgtgcggcgcttgcgggccagctggagttgcaggtaggcgtgggcttggcgggcccccgcactcgggacagccagccagccctgctggccccgggcagtgagggacttagcacccgggccagtggctgcggaaggtgtactgggtcccccagcagtgccggcccaccggcgctgtgctcgatttctcgccgggccttagctgccttcctgcggggcaaggctcaggacctgcagcccgccatgcctgagcctcccacccactccatgggctcctgtgcagcccgagcctccccgacgagcaccaccccctgctccatggcgcccagtcccagcgaccacccaagggctgaggaatgcgagcgcacagcgcaggactggcaggcagctccacctgcagccctggtacgggatccactaggtgaagccagctgggctcctgagtctggtgaggacgtggagagtctttatgtctagctcagggattgtaaatacaccagtcagcaccctgtgtttagctcaaggtttgtgagtgcaccaatcgacactctgtatttagctgctctggtggggccttggagaacctttatgtctagctcagggattgtaaacataccaatcagcactctgtgtctagctcagggtttgtgagtgcaccaatcgacactctgtatctagctgctctggtggggccttggaaaacctttatgtctagctcagggattgtaaatataccaatcggcactgtgtatctagctcaaggtttgtaaacacaccaatcagcaccctgtgtttagctcaaggtttgtgagtgcaccaatccacactctgtatctagctgctctggtggggccttggagaacctttgtgttgatactctgtatctaatctgatggggacgtggagaacctttgtatctagctcagggattgtaaatgcaccagtcagcaccctgtcaaaacaggccactcggctctaccaatcagcaggatgtgggtggggccagataagagaataaaagcaggctgcccgagccagcattggcaacccacttgggtccccttccacagtgtggaagctttgttctttgctctttgcagtagatgttgctactgctcactctgggtccatgctgcttttatgagctgtaacactcaccacgaaggtctgcagcttcactcctgaccccagtgagaccacgagcccactgggaggaacgaaaagctccagactcgctgccttaagagctgtaacactcaccgtgaaggtctgcagcttcactcctgagccagcgagaccacgaacccaccagaaggaagaaactccgaacacatctgaacatcagaagggacagactccagacgcgccaccttaagagctgtaacactcaccgcgagggtccgcggcttcaatcttgaagtcagtgagaccaagaacccaccaattccggacacagtttgtcagttcctcaagtgttaaagctagaattactctatgccccagcaattccacttctaggtgtatacccaagagaaatgaacacatgtccatacaaaactcgtgcatgaatgttcataacagcattatttgtaatagccaaaaagttgaaacaacctaaatatccatcaaatgcctatcaactaataaataaacaaaatgtgatgtatccatacaatggaatattatgcagccatacaaagatatgaaatacagatacatgccacagcatggataagccttaaaaacattctgctatatgaaagtggccagtcataaatgatcacatatgatatgcttccatttacatgaaatgttcagaacaggcaattttatagaggcaaaaagtagatgagtcattgcctagagctacagggtaggtgaggaatggagtgcagggttttctttagggatgatgaaatgctgcaaaatggattgtggtgatggctgcacaatgttgtgaatatactaaaaaacactgaatcatgaaaattaaatttcttaattatatatgtggattatatcttaataaagctgttacaaaaaatatatgagcatcattctatacctcaagtcaaaactaaattaagctgtagcaccataatttgaaaggcatccatagtctagggatatgtcatccagcagacaaatagtaagaaaaaagcaatttccctctgctaggctcacaattgatcaggcctttataatagagtcctgtgtccagttttaatctctgtcttttaataagagtgtggataaatggaagagaattctgaggagtccatcatagtgacactaaattattagcaacttatgaaagaatatgaaggatattggtataatttaatccagaatcgggggtgaaaaacagagcagggcatttgggcaatgtaaaggaaccaagggctgtctgctaggagataaaatcttatcatgaggggaaatgaaccagctctgtaccatagctatgggggatataattaagtaaagttggaataaattaaagccattcaaagttggaatattatggaatattataactttatacattgtcctgatagagtaattatttacagaaagacaataacaggaggactttaaaaaccttttctagagacatttaagattagaaaggatgggtatttttaggagtttaaagaacatgaaaaattcataagcttttctgtatataaaaatatcaagatcccaaaaaaatacatattaaaagatcacgaccagggaaacttccaggcaaaaagaatgaccgggaagaaatatatgaaaagtttaacagttcttaccgtttatttgaagatcggtgcatatcattatctttatttcctatattttttcacatttcccatagagtacgtccatatatttatagtcaacaaatacaacttaaaaatacatggaagatacaggtgatctgtcttagtttaggtgtttgtgtcctctctagataactgatacattttcatcacacttttctcacaggcaagaaatgtctactccaggagcaaggattatgttaaccactccccttccttaatttagttttattttgtctttctgatttattaggtctatgtgataacactattataactgactttggagttattatttttcaccaaatagatcttgcacactatatttgctcaaataagatataattttagtgagaattcctcatctcttatttgattaggggactatactacagatttttaatagcgagctatttcacaaagcaagtgtgttaccactcagattgcttaggtataaagaatatacaaagaaaaaaagtaaatggattgtttccagggtgctctggtttaattgtatcgcacaatgcctttggttcatctttcttttgttgatctcaaagctactggcaactcagctagcctttactgagtgattaccatgggcaggtttcttctcagggtttcaaccttatactcccgcataacagataaacaattttttcaagttaatctaagttaataatttggagttcttatttggagatcccaggtaagcaagcctgctggagagttagctcataagcaaaagctgtgctaaggcttctcctattttttttttttttgtaactttcatcaacagtcctacttatgtcctactggcttttctatatgcattttaagtttggtgtcattaatgatgacataatagtatttatatatcttcctttctctagagatgtggtccccaagtaattcagatttctgaacttcacttcagcttctatttctgggataggacccttgcatatgtttgttttaaaagctccctgcattaaaaacaaccaggctcagatggctccattaaggggttttgcttatttgtctcctgcataagccagaggctttcaatgcttggctgaatacagtctctgaggagcttttaaaaaatgcaaatgcccgcggggcgtggtggctcacgcctgtaatcccagcactttgggaggcagaggtgggcggatcatgaggtcaagagatcgagaccattctggccaacatgttgaaacctcatctctactaaaagtacaaaaattagctgggtgtggtggtgcgcacctgtactcccagctactcgggaggctgaggcaggagaatagcttgaacctgggaggcagaggttgcagtgagccgagattgtgccgctgcactccagcctggcgacagagcgagactccatctcaaaaaaaataaataaataaaaatgcaaataccttggcctcacccaaggccaattatattaaaatatatgcagtgcagtgggggcaggggaggcaatgtgaccagatattagtgttttttaatagaaagtgttgcaggtgatttcaaatatagagtgagatttgataacttgtgatgaaggactttttattgctatgtcttgattgtcaccatttgatatgctcccctatgtcagctgctctataaaggcttgccaaatgattgatggactggacatcccctattgtatttgcccatccctgaatcctgaatggcattaagatgggtctggttctagattgagtcatgttggtcttcattttcttagcacaggtgcagcagtgaacagcagtgagagtctccctccatcctcgtctgtcaatgacatctcctccatgtccaccgaccagaccctggcatctgacactgacagcagcctggaagcctcggcaggacccctgggttgttgcaggtgactagccgcctgcctgcgaaacccagcgttcttcaggagatgatgtgatggaacacacacacacgcagacacacacacacacacaaatgcagacacacaacatcaagaaaacagcaagggagagaatccaagcctaaaattaaataaatctttcagcctgcttcttccccagggttctgtattgcagctaagctcaaatgtatatttaacttctagttgctcttgctttggtcttcttccaatgatgcttactacagaaagcaaatcagacacaattagagaagccttttccataaagtgtaattttaatggctgcaaaaccggcaacctgtaactgcccttttaaatggcatgacaaggtgtgcagtggccccatccagcatgtgtgtgtctctatcttgcatctacctgctccttggcctagtcagatggatgtagatacagatccgcatgtgtctgtattcatacagcactacttacttagagatgctactgtcagtgtcctcagggctctaccaagacataatgcactggggtaccacatggtccatttcatgtgatctattactctgacataaacccatctgtaatatattgccagtatataagctgtttagtttgttaattgattaaactgtatgtcttataagaaaacatgtaaagggggaatatatggggggagtgagctctctcagacccttgaagatgtagcttccaaatttgaatggattaaatggcacctgtataccaatttgtagaaagaacatatgtgatacttatgtaaagtgtggggcgagtgggtaacagttttcaggcacaaaatggtttggccttctgaaggcaggtgtgaataaaagctgagagtcttttctgtgacagtaaagagtaggagagactggagggtagtgtgtggtgtggactaagactgaaaggaggttattacccagatactaggagacactggtgtccctgttttagagatttggctctatacccatttgtcatttctcaattactggtcacaacaagaggccactggagaaagtggcaggtggtgaagcaaggttattgtgtgtgcttttgatgataagaatctctctctggaactgagcagaattgcctccatgtgaattccttcaacaaaaaaatgagcctgcctagactactttcagattgtggattgtgttttccatgtgtgggctgcttccctgattcatactctgccaaagttttattttgagaaataatattactttcctcttctgaaataaaataataataataataatgaaacccccaaaccacagtgtgagtctcaggttagcatttgaaaacatctccagagacattgttattcctcaggagtttccctgactccttaatgtggctgatgtttcatgtttatttatttattttaataagtatgagcaatcgaagggctgatcatctgagttttgtactgcagtagatgtaagagcaataactctgcccataaatttactgctgccaaatagttttagcaatatgagtttgtcttaaaagccatgaagcattaatgtcaatgtttagcaaaatctccagaatttagcttaaattaaattaaatgaaagtgctttcctgagcacttaaggaggcactgtgaaacatcttggttatgtacaaggcaataccaaggtgatctcagcaataatcaggcttcccttcttattcacttcgaagtatccatcacagttatttgcactctgaccatgttggtgctcactagagtggtgatatttcacctgaagaagtgaaagacaggaagtggatggttgatgagtgtgaactgattggcaaatagaatatccccaaaacagagcaaacaagaatgccagtgctctgaaaactgccttaaatataataatagggaactttctttctctcttcaagcaatagagaccacagggaactgcacccacctgcaccatcgccatgccagtggtgctgccattctgagattatttcacacagtcagattcagtacacgcagtcatttgtttaaaataaatagaagaacattcctttgtgcagcttgtcccctggaataaaaatggcccattttctcta

SEQ ID NO: 49 - protein, 422 aa, Homo sapiens
MSLHFLYYCSEPTLDVKIAFCQGFDKQVDVSYIAKHYNMSKSKVDNQFYSVEVGDSTFTVLKRYQNLKPIGSGAQGIVCAAYDAVLDRNVAIKKLSRPFQNQTHAKRAYRELVLMKCVNHKNIISLLNVFTPQKTLEEFQDVYLVMELMDANLCQVIQMELDHERMSYLLYQMLCGIKHLHSAGIIHRDLKPSNIVVKSDCTLKILDFGLARTAGTSFMMTPYVVTRYYRAPEVILGMGYKENVDIWSVGCIMGEMVRHKILFPGRDYIDQWNKVIEQLGTPCPEFMKKLQPTVRNYVENRPKYAGLTFPKLFPDSLFPADSEHNKLKASQARDLLSKMLVIDPAKRISVDDALQHPYINVWYDPAEVEAPPPQIYDKQLDEREHTIEEWKELIYKEVMNSEEKTKNGVVKGQPSPSAQVQQ

SEQ ID NO: 50 - protein, 464 aa, Homo sapiens
MSLHFLYYCSEPTLDVKIAFCQGFDKQVDVSYIAKHYNMSKSKVDNQFYSVEVGDSTFTVLKRYQNLKPIGSGAQGIVCAAYDAVLDRNVAIKKLSRPFQNQTHAKRAYRELVLMKCVNHKNIISLLNVFTPQKTLEEFQDVYLVMELMDANLCQVIQMELDHERMSYLLYQMLCGIKHLHSAGIIHRDLKPSNIVVKSDCTLKILDFGLARTAGTSFMMTPYVVTRYYRAPEVILGMGYKENVDIWSVGCIMGEMVRHKILFPGRDYIDQWNKVIEQLGTPCPEFMKKLQPTVRNYVENRPKYAGLTFPKLFPDSLFPADSEHNKLKASQARDLLSKMLVIDPAKRISVDDALQHPYINVWYDPAEVEAPPPQIYDKQLDEREHTIEEWKELIYKEVMNSEEKTKNGVVKGQPSPSGAAVNSSESLPPSSSVNDISSMSTDQTLASDTDSSLEASAGPLGCCR

SEQ ID NO: 51 - protein, 426 aa, Homo sapiens
MSKSKVDNQFYSVEVGDSTFTVLKRYQNLKPIGSGAQGIVCAAYDAVLDRNVAIKKLSRPFQNQTHAKRAYRELVLMKCVNHKNIISLLNVFTPQKTLEEFQDVYLVMELMDANLCQVIQMELDHERMSYLLYQMLCGIKHLHSAGIIHRDLKPSNIVVKSDCTLKILDFGLARTAGTSFMMTPYVVTRYYRAPEVILGMGYKENVDIWSVGCIMGEMVRHKILFPGRDYIDQWNKVIEQLGTPCPEFMKKLQPTVRNYVENRPKYAGLTFPKLFPDSLFPADSEHNKLKASQARDLLSKMLVIDPAKRISVDDALQHPYINVWYDPAEVEAPPPQIYDKQLDEREHTIEEWKELIYKEVMNSEEKTKNGVVKGQPSPSGAAVNSSESLPPSSSVNDISSMSTDQTLASDTDSSLEASAGPLGCCR

SEQ ID NO: 52 - protein, 277 aa, Homo sapiens
MELMDANLCQVIQMELDHERMSYLLYQMLCGIKHLHSAGIIHRDLKPSNIVVKSDCTLKILDFGLARTAGTSFMMTPYVVTRYYRAPEVILGMGYKENVDIWSVGCIMGEMVRHKILFPGRDYIDQWNKVIEQLGTPCPEFMKKLQPTVRNYVENRPKYAGLTFPKLFPDSLFPADSEHNKLKASQARDLLSKMLVIDPAKRISVDDALQHPYINVWYDPAEVEAPPPQIYDKQLDEREHTIEEWKELIYKEVMNSEEKTKNGVVKGQPSPSAQVQQ

1-75. (canceled)

76. A method of generating a cell for protein production, the method comprising manipulating the cell to alter a level of interaction between Hsp70 and IRE1α.

77. The method of claim 76, wherein the method comprises manipulating the cell to increase the level of interaction between Hsp70 and IRE1α, such that the level of unconventionally-spliced XBP1 (XBP1s) mRNA rises.

78. The method of claim 77, wherein the method comprises increasing a level of expression of at least one of Hsp70 or IRE1α.

79. The method of claim 78, wherein the method comprises transfecting the cell with a plasmid expressing Hsp70 or IRE1α.

80. The method of claim 78, wherein the method comprises inserting a strong promoter that is transcriptionally linked to an endogenous gene encoding Hsp70 or IRE1α.

81. The method of claim 76, wherein the method comprises manipulating the cell to decrease the level of interaction between Hsp70 and IRE1α, such that level of activated JNK or level of activation of JNK decreases.

82. The method of claim 76, wherein the method comprises administering at least one of an Hsp70 neutralizing agent or an IRE1α neutralizing agent to the cell.

83. The method of claim 76, wherein the Hsp70 is Hsp72.

84. The method of claim 76, further comprising isolating a protein of interest from a preparation of the cell.

85. A cell produced according to the method of claim 76.

86. A method of treating a disease, the method comprising modulating an interaction between Hsp70 and IRE1α.

87. The method of claim 86, wherein the method comprises modulating the interaction between Hsp70 and IRE1α such that a level of unconventionally-spliced XBP1 (XBP1s) mRNA is altered.

88. The method of claim 87, wherein the method comprises:
decreasing a level of the interaction between Hsp70 and IRE1α, such that the level of the unconventionally-spliced XBP1 (XBP1s) mRNA is reduced; or
increasing a level of the interaction between Hsp70 and IRE1α, such that the level of the unconventionally-spliced XBP1 mRNA rises.

89. The method of claim 88, wherein the disease is selected from the group consisting of cancer, an autoimmune disease, diabetes and cardiac disease.

90. The method of claim 88, comprising administering at least one of an Hsp70 neutralizing agent or an IRE1α neutralizing agent to an affected cell.

91. The method of claim 88, wherein the Hsp70 is Hsp72.

92. The method of claim 90, wherein the Hsp70 neutralizing agent is an anti-Hsp70 antibody, and wherein the IRE1α neutralizing agent is an anti-IRE1α antibody.

93. The method of claim 92, wherein the anti-Hsp70 antibody is an anti-HSP70 monoclonal antibody and wherein the anti-IRE1αantibody is an anti-IRE1α monoclonal antibody.

94. The method of claim 92, wherein the anti-Hsp70 antibody is directed to an ATPase domain of Hsp70.

95. The method of claim 92, wherein the anti-IRE1α antibody is directed to a cytosolic C-terminal region of IRE1α.

96. The method of claim 88, wherein the method further comprises inducing cellular stress.

97. The method of claim 86, wherein the method comprises modulating the interaction between Hsp70 and IRE1α such that a level of activated JNK or a level of JNK activation is altered.

98. A pharmaceutical composition comprising an Hsp70 neutralizing agent and/or an IRE1α neutralizing agent and a pharmaceutically acceptable carrier or the amino acid sequence of Hsp70 or a plasmid encoding Hsp70, and/or the amino acid sequence of IRE1α or a plasmid encoding IRE1α and a pharmaceutically acceptable carrier.

99. A method of treating a disease comprising administering the pharmaceutical composition of claim 98 to an animal, wherein the disease selected from the group consisting of cancer, an autoimmune disease, diabetes and cardiac disease.
